(19) United States
(12) Patent Application Publication
(10) Pub. No.: US 2024/0207331 A1
(43) Pub. Date: Jun. 27, 2024

(54) COMPOSITIONS AND METHODS FOR IMPROVING MILK YIELD AND MILK COMPOSITIONAL CHARACTERISTICS IN RUMINANTS

(71) Applicant: Native Microbials, Inc., San Diego, CA (US)

(72) Inventor: Mallory EMBREE, San Diego, CA (US)

(21) Appl. No.: 18/556,632

(22) PCT Filed: Apr. 22, 2022
(86) PCT No.: PCT/US2022/026037

§ 371 Date: Oct. 20, 2023

Related U.S. Application Data
(60) Provisional application No. 63/178,230, filed on Apr. 22, 2021.

(51) Int. Cl. A61K 35/741; A23K 10/18; A23K 50/10; A61K 9/00; A61K 35/00; A61P 15/14

(52) U.S. Cl. CPC A61K 35/741; A23K 10/18; A23K 50/10; A61K 9/0053; A61P 15/14; A61K 2035/115

(57) ABSTRACT

The disclosure relates to isolated microorganisms, microbial ensembles, and compositions comprising the same. Furthermore, the disclosure teaches methods of utilizing the described microorganisms, microbial ensembles, and compositions comprising the same, in methods for modulating the production and yield of milk and milk components in ruminants. In particular aspects, the disclosure provides methods of increasing desirable components of milk in ruminants.

### CROSS-REFERENCE

[0001] This application claims the benefit of U.S. Provisional Application No. 63/178,230, filed Apr. 22, 2021, which application is incorporated herein by reference in its entirety.

### FIELD

[0002] The present disclosure relates to isolated and biologically pure microorganisms that have applications, inter alia, in dairy production. The disclosed microorganisms can be utilized in their isolated and biologically pure states, as well as being formulated into compositions. Furthermore, the disclosure provides microbial ensembles, containing at least two members of the disclosed microorganisms, as well as methods of utilizing said microbial ensembles.

### STATEMENT REGARDING SEQUENCE LISTING

[0003] The sequence listing associated with this application is provided in text format in lieu of a paper copy, and is hereby incorporated by reference into the specification. The name of the text file containing the sequence listing is ASBI_026_01WO_SeqList_ST25.txt. The text file is approximately 2.08 MB, was created on Apr. 21, 2022, and is being submitted electronically via EFS-Web.

### BACKGROUND

[0004] The global population is predicted to increase to over 9 billion people by the year 2050 with a concurrent reduction in the quantity of land, water, and other natural resources available per capita. Projections indicate that the average domestic income will also increase, with the projected rise in the GDP of China and India. The desire for a diet richer in animal-source proteins rises in tandem with increasing income, thus the global livestock sector will be charged with the challenge of producing more milk using fewer resources. The Food and Agriculture Organization of the United Nations predict that 70% more food will have to be produced, yet the area of arable land available will decrease. It is clear that the food output per unit of resource input will have to increase considerably in order to support the rise in population.

[0005] Milk and milk components from lactating ruminants are predominantly utilized in the preparation of foodstuffs in many different forms. Nevertheless, milk and milk components find numerous alternative applications in non-food areas such as the manufacture of glues, textile fibers, plastic materials, or in the production of ethanol or methane. There have been many strategies to improve milk production and content in ruminants through nutritional modulations, hormone treatments, changes in animal management, and selective breeding; however, the need for more efficient production of milk and milk components per animal is required.

[0006] Identifying compositions and methods for sustainably increasing milk production and modulating milk compositional characteristics while balancing animal health and wellbeing have become imperative to satisfy the needs of every day humans in an expanding population. Increasing the worldwide production of milk and further modulating desirable milk components by scaling up the total number of livestock on dairy farms would not only be economically infeasible for many parts of the world, but would further result in negative environmental consequences.

[0007] Thus, meeting global milk and milk component yield expectations, by simply scaling up current high-input agricultural systems—utilized in most of the developed world—is simply not feasible.

[0008] There is therefore an urgent need in the art for improved methods of increasing milk production and further increasing yield of desirable milk components.

### SUMMARY OF THE DISCLOSURE

[0009] The present disclosure provides an orally deliverable composition for increasing milk production or improving milk compositional characteristics in a ruminant, comprising: (a) one or more bacteria comprising a 16S nucleic acid sequence with at least about 97% sequence identity to any one of SEQ ID NOs: 2125-4945; and (b) a carrier suitable for ruminant administration. In some embodiments, the one or more bacteria comprises a 16S nucleic acid sequence selected from the group consisting of SEQ ID NOs: 2125-4945.

[0010] In some embodiments, the composition comprises: (a) one or more bacteria comprising a 16S nucleic acid sequence with at least about 97% sequence identity to any one of SEQ ID NOs: 1-30, 2045-2103, 2108, 4104, 4116, 4364, 4620, 4814, 4828, 4921, 4943, 4944, and 4945; and/or (b) one or more fungi comprising an ITS nucleic acid sequence with at least about 97% sequence identity to any one of SEQ ID NOs: 31-60 and 2104-2107.

[0011] In some embodiments, the composition comprises: (a) one or more bacteria comprising a 16S nucleic acid sequence selected from the group consisting of SEQ ID NOs: 1-30, 2045-2103, 2108, 4104, 4116, 4364, 4620, 4814, 4828, 4921, 4943, 4944, and 4945; and/or (b) one or more fungi comprising an ITS nucleic acid sequence selected from the group consisting of SEQ ID NOs: 31-60 and 2104-2107.

[0012] In some embodiments, the ruminant is a cow. In some embodiments, the ruminant is a calf.

[0013] In some embodiments, the ruminant administered the composition exhibits an increase in milk production that leads to an increase in milk yield or an increase in energy-corrected milk.

[0014] In some embodiments, the ruminant administered the composition exhibits an improved milk compositional characteristic selected from the group consisting of: an increase in milk fat(s), an increase in milk protein(s), an increase of carbohydrates in milk, an increase of vitamins in milk, an increase of minerals in milk, or combinations thereof.

[0015] In some embodiments, the ruminant administered the composition exhibits at least one improved phenotypic trait, selected from the group consisting of: an improved efficiency in feed utilization, improved digestibility, an increase in polysaccharide and lignin degradation, an increase in fatty acid concentration in the rumen, pH balance in the rumen, a reduction in methane emissions, a reduction in manure production, improved dry matter intake, an improved efficiency of nitrogen utilization, or combinations thereof.

[0016] In some embodiments, the composition is formulated to protect the one or more bacteria from external stressors prior to entering the gastrointestinal tract of the ruminant. In some embodiments, the composition is formulated to protect the one or more bacteria from oxidative stress. In some embodiments, the composition is formulated to protect the one or more bacteria from moisture.

[0017] In some embodiments, the composition is dry. In some embodiments, the composition is combined with food. In some embodiments, the composition is combined with cereal, starch, oilseed cake, or vegetable waste. In some embodiments, the composition is combined with hay, haylage, silage, livestock feed, forage, fodder, beans, grains, micro-ingredients, fermentation compositions, mixed ration, total mixed ration, or a mixture thereof. In some embodiments, the composition is formulated as a solid, liquid, or mixture thereof. In some embodiments, the composition is formulated as a pellet, capsule, granulate, or powder. In some embodiments, the composition is combined with water, medicine, vaccine, vitamin, mineral, amino acid, enzyme, or a mixture thereof.

[0018] In some embodiments, the composition is encapsulated. In some embodiments, the composition is encapsulated in a polymer or carbohydrate.

[0019] In some embodiments, the one or more bacteria are present in the composition in an amount of at least 10² cells.

[0020] In some embodiments, the present disclosure provides a method for increasing milk production or improving milk compositional characteristics in a ruminant, the method comprising orally administering to a ruminant an effective amount of any one of the compositions described herein.

[0021] In some embodiments, the ruminant administered the effective amount of the composition exhibits an increase in milk production that leads to a measured increase in milk yield.

[0022] In some embodiments, the ruminant administered the effective amount of the composition exhibits an increase in milk production and improved milk compositional characteristics that leads to a measured increase in energy-corrected milk.

[0023] In some embodiments, the ruminant administered the effective amount of the composition exhibits an improved milk compositional characteristic selected from the group consisting of: an increase in milk fat(s), an increase in milk protein(s), an increase of carbohydrates in milk, an increase of vitamins in milk, an increase of minerals in milk, or combinations thereof.

[0024] In some embodiments, the ruminant administered the effective amount of the composition exhibits at least a 1% increase in the average production of milk fat(s), milk protein(s), energy-corrected milk, or combinations thereof.

[0025] In some embodiments, the ruminant administered the effective amount of the composition exhibits at least a 10% increase in the average production of: milk fat(s), milk protein(s), energy-corrected milk, or combinations thereof.

[0026] In some embodiments, the ruminant administered the effective amount of the composition exhibits at least a 20% increase in the average production of: milk fat(s), milk protein(s), energy-corrected milk, or combinations thereof.

[0027] In some embodiments, the ruminant administered the effective amount of the composition, further exhibits at least one improved phenotypic trait, selected from the group consisting of an improved efficiency in feed utilization, improved digestibility, an increase in polysaccharide and lignin degradation, an increase in fatty acid concentration in the rumen, pH balance in the rumen, a reduction in methane emissions, a reduction in manure production, improved dry matter intake, an improved efficiency of nitrogen utilization, or combinations thereof.

[0028] In some embodiments, the ruminant administered the effective amount of the composition, further exhibits a shift in the microbiome of the rumen.

[0029] In some embodiments, the ruminant administered the effective amount of the composition, further exhibits a shift in the microbiome of the rumen, wherein a population of microbes present in the rumen before administration of the composition increase in abundance after administration of the composition.

[0030] In some embodiments, the ruminant administered the effective amount of the composition, further exhibits: a shift in the microbiome of the rumen, wherein a population of microbes present in the rumen before administration of the composition decrease in abundance after administration of the composition.

[0031] In some embodiments, the ruminant administered the effective amount of the composition, further exhibits: a shift in the microbiome of the rumen, wherein a first population of microbes present in the rumen before administration of the composition increase in abundance after administration of the composition, and wherein a second population of microbes present in the rumen before administration of the composition decrease in abundance after administration of the composition.

[0032] In some embodiments, the present disclosure provides a composition that performs the same or better than recombinant bovine growth hormone for increasing milk production or improving milk compositional characteristics in a ruminant, wherein the composition comprises: (a) one or more bacteria comprising a 16S nucleic acid sequence with at least about 97% sequence identity to any one of SEQ ID NOs: 2125-4945; and (b) a carrier suitable for ruminant administration.

[0033] In some embodiments, the one or more bacteria comprises a 16S nucleic acid sequence selected from the group consisting of SEQ ID NOs: 2125-4945.

[0034] In some embodiments, the composition comprises: (a) one or more bacteria comprising a 16S nucleic acid sequence with at least about 97% sequence identity to any one of SEQ ID NOs: 1-30, 2045-2103, 2108, 4104, 4116, 4364, 4620, 4814, 4828, 4921, 4943, 4944, and 4945; and/or (b) one or more fungi comprising an ITS nucleic acid sequence with at least about 97% sequence identity to any one of SEQ ID NOs: 31-60 and 2104-2107.

[0035] In some embodiments, the composition comprises: (a) one or more bacteria comprising a 16S nucleic acid sequence selected from the group consisting of SEQ ID NOs: 1-30, 2045-2103, 2108, 4104, 4116, 4364, 4620, 4814, 4828, 4921, 4943, 4944, and 4945; and/or (b) one or more fungi comprising an ITS nucleic acid sequence selected from the group consisting of SEQ ID NOs: 31-60 and 2104-2107.

### DESCRIPTION OF THE DRAWINGS

[0036] FIG. 1 shows a general workflow of one embodiment of the method for determining the absolute abundance of one or more active microorganism strains.

[0037] FIG. 2 shows a general workflow of one embodiment of a method for determining the co-occurrence of one or more, or two or more, active microorganism strains in a sample with one or more metadata (environmental) parameters, followed by leveraging cluster analysis and community detection methods on the network of determined relationships.

[0038] FIG. 3 depicts a schematic diagram that illustrates an example process flow for use with an exemplary microbe interaction analysis and selection system, including the determination of MIC scores discussed throughout the present disclosure.

### Budapest Treaty on the International Recognition of the Deposit of Microorganisms for the Purpose of Patent Procedures

[0039] Some microorganisms described in this application were deposited with the United States Department of Agriculture (USDA) Agricultural Research Service (ARS) Culture Collection (NRRL®), located at 1815 N. University St., Peoria, IL 61604, USA. Some microorganisms described in this application were deposited with the Bigelow National Center for Marine Algae and Microbiota, located at 60 Bigelow Drive, East Boothbay, Maine 04544, USA. Some microorganisms described in this application were also deposited with the American Type Culture Collection (ATCC®), located at 10801 University Blvd., Manassas, VA 20110, USA. Some microorganisms described in this application were deposited with the National Collection of Type Cultures operated by the Public Health England, located at Porton Down, Salisbury, SP4 0JG, United Kingdom.

[0040] The deposits were made under the terms of the Budapest Treaty on the International Recognition of the Deposit of Microorganisms for the Purposes of Patent Procedure and/or type strain rules and procedures. The deposit accession numbers for the Budapest Treaty deposits and type strains are provided in Table 2. The depository, accession numbers, and corresponding dates of deposit for the microorganisms described in this application are separately provided in Table 4.

[0041] In Table 1, the closest predicted hits for taxonomy of the microbes are listed in columns 2, and 5. Column 2 is the top taxonomic hit predicted by BLAST, and column 5 is the top taxonomic hit for genus+species predicted by BLAST. Table 3 shows the top taxonomic hit predicted by BLAST. Table 14 shows the sprain designation, deposition number, parent strain, percent match, MIC, predicted taxonomy and sequence identifier of each additional micobe. The compositions of the present disclosure may contain any one, or any combination, of the microbes listed below in Tables 1, 3, and 14. The microbes of Tables 1, 3, and 14 may be administered as a single microbial product and/or as a microbial consortia comprising a combination of microbes from Tables 1, 3, and 14.

[0042] The strains designated in the tables below have been deposited in the labs of Native Microbials, Inc. since at least before the date of filing of the present application and before the date of deposit with the noted depository institutions.

TABLE 1
Microbes of the present disclosure

| | | | | BLAST | | | | | |
|---|---|---|---|---|---|---|---|---|---|
| | | | | Taxonomic | | | | | |
| | BLAST | Blast | | Top Hit | Blast | | | | |
| Predicted Taxa of | Taxonomic | % | Query | w/Genus + | % | Query | Strain | Sequence | MIC |
| Isolated Microbes | Top Hit | Ident. | Cover | Species | Identity | Cover | Designation | Identifier | Score |
| Ruminococcus bovis | Clostridiaceae | 96% | 100% | Ruminococcus | 91% | 82% | Ascusb_5 | SEQ ID | 0.85694 |
| sp. nov. | bacterium | | | bromii | | | | NO: 1 | |
| Ruminococcus bovis | Clostridiaceae | 96% | 100% | Ruminococcus | 91% | 82% | Ascusb_5 | SEQ ID | 0.85694 |
| sp. nov. | bacterium | | | bromii | | | | NO: 2108 | |
| Ruminococcus | Rumen bacterium | 93% | 84% | Ruminococcus | 91% | 82% | Ascusb_7 | SEQ ID | 0.97384 |
| (Genus) | | | | bromii | | | | NO: 2 | |
| Clostridium IV | Rumen bacterium | 89% | 97% | Intestinimonas | 85% | 100% | Ascusb_26 | SEQ ID | 0.82051 |
| (Cluster) | NK4A214 | | | butyriciproducens | | | | NO: 3 | |
| Roseburia (Genus) | Lachnospiraceae | 89% | 100% | Pseudobutyrivibrio | 89% | 96% | Ascusb_27 | SEQ ID | 0.87214 |
| | bacterium | | | ruminis | | | | NO: 4 | |
| Hydrogenoanaero- | Lachnospiraceae | 87% | 93% | Roseburia | 86% | 93% | Ascusb_32 | SEQ ID | 0.81269 |
| bacterium (Genus) | bacterium | | | inulinivorans | | | | NO: 5 | |
| Clostridium XIVa | Eubacterium | 92% | 100% | Eubacterium | 92% | 100% | Ascusb_79 | SEQ ID | 0.82765 |
| (Cluster) | ventriosum | | | ventriosum | | | | NO: 6 | |
| Saccharofermentans | Rumen bacterium | 87% | 100% | Faecalibacterium | 91% | 76% | Ascusb_82 | SEQ ID | 0.93391 |
| (Genus) | | | | prausnitzii | | | | NO: 7 | |
| Saccharofermentans | Saccharofermentans | 100% | 99% | Saccharofermentans | 83% | 92% | Ascusb_102 | SEQ ID | 0.82247 |
| (Genus) | sp. | | | acetigenes | | | | NO: 8 | |
| Butyricicoccus | Clostridium sp. | 87% | 100% | Ruminococcus | 86% | 99% | Ascusb_89 | SEQ ID | 0.74361 |
| (Genus) | | | | flavefaciens | | | | NO: 9 | |
| Papillibacter | Rumen bacterium | 91% | 99% | Clostridium | 88% | 82% | Ascusb_111 | SEQ ID | 0.82772 |
| (Genus) | NK4A214 | | | saccharolyticum | | | | NO: 10 | |
| Ruminococcus | Ruminococcaceae | 100% | 94% | Clostridium | 85% | 99% | Ascusb_119 | SEQ ID | 0.8263 |
| (Genus) | | | | lentocellum | | | | NO: 11 | |
| Hydrogenoanaero- | Rumen bacterium | 85% | 98% | Ruminococcus | 85% | 100% | Ascusb_145 | SEQ ID | 0.81161 |
| bacterium (Genus) | NK4B29 | | | flavefaciens | | | | NO: 12 | |
| Pelotomaculum | Faecalibacterium | 86% | 93% | Faecalibacterium | 86% | 82% | Ascusb_205 | SEQ ID | 0.81461 |
| (Genus) | sp. | | | prausnitzii | | | | NO: 13 | |
| Saccharofermentans | Bacterium | 99% | 91% | Saccharofermentans | 90% | 79% | Ascusb_232 | SEQ ID | 0.81428 |
| (Genus) | MA3003 | | | acetigenes | | | | NO: 14 | |
| Lachnospiraceae | Bacterium | 95% | 93% | Blautia luti | 88% | 92% | Ascusb_252 | SEQ ID | 0.8196 |
| incertae sedis (Family) | VCD3003 | | | | | | | NO: 15 | |
| Butyricicoccus | Ruminococcaceae | 91% | 77% | Clostridium | 83% | 99% | Ascusb_268 | SEQ ID | 0.74813 |
| sensu stricto (Genus) | bacterium | | | lentocellum | | | | NO: 16 | |
| Lachnospiraceae | Bacterium | 96% | 92% | Coprococcus catus | 88% | 100% | Ascusb_374 | SEQ ID | 0.76214 |
| incertae sedis (Family) | YAB2006 | | | | | | | NO: 17 | |
| Anaeroplasma | Anaeroplasma | 97% | 100% | Anaeroplasma | 97% | 100% | Ascusb_411 | SEQ ID | 0.76213 |
| (Genus) | varium | | | varium | | | | NO: 18 | |
| Clostridium sensu | Clostridiales | 100% | 93% | Clostridium | 81% | 91% | Ascusb_546 | SEQ ID | 0.83869 |
| stricto (Genus) | bacterium | | | stercorarium | | | | NO: 19 | |
| Butyricicoccus | Clostridiales | 88% | 91% | Aminiphilus | 80% | 77% | Ascusb_672 | SEQ ID | 0.74829 |
| (Genus) | bacterium | | | circumscriptus | | | | NO: 20 | |
| Butyricicoccus | Clostridiales | 89% | 89% | Aminiphilus | 97% | 27% | Ascusb_765 | SEQ ID | 0.74111 |
| (Genus) | bacterium | | | circumscriptus | | | | NO: 21 | |
| Rikenella | Bacteroides sp. | 93% | 64% | Alistipes shahii | 93% | 64% | Ascusb_812 | SEQ ID | 0.73874 |
| (Genus) | | | | | | | | NO: 22 | |
| Tannerella | Alistipes shahii | 86% | 100% | Alistipes shahii | 86% | 100% | Ascusb_1295 | SEQ ID | 0.8365 |
| (Genus) | | | | | | | | NO: 23 | |
| Howardella | Clostridiales | 85% | 100% | Oscillibacter | 89% | 41% | Ascusb_1763 | SEQ ID | 0.75083 |
| (Genus) | bacterium | | | valericigenes | | | | NO: 24 | |
| Prevotella | Bacteroidetes | 97% | 95% | Odoribacter | 77% | 86% | Ascusb_1780 | SEQ ID | 0.89749 |
| (Genus) | bacterium | | | splanchnicus | | | | NO: 25 | |
| Butyricimonas | Bacteroidetes | 95% | 99% | Tannerella forsythia | 83% | 92% | Ascusb_1801 | SEQ ID | 0.89664 |
| (Genus) | bacterium | | | | | | | NO: 26 | |
| Clostridium sensu | Bacterium | 96% | 93% | Hydrogenoanaero- | 84% | 86% | Ascusb_1833 | SEQ ID | 0.73989 |
| | | | | bacterium | | | | | |
| stricto (Genus) | XBB3002 | | | saccharovorans | | | | NO: 27 | |
| Clostridium sensu | Clostridium | 98% | 100% | Clostridium | 98% | 100% | Ascusb_3138 | SEQ ID | 0.76524 |
| stricto (Genus) | butyricum | | | butyricum | | | | NO: 28 | |
| Saccharofermentans | Rumen bacterium | 87% | 99% | Faecalibacterium | 90% | 76% | Ascusb_6589 | SEQ ID | 0.76539 |
| (Genus) | NK4A214 | | | prausnitzii | | | | NO: 29 | |
| Lachnospiraceae | Roseburia | 90% | 100% | Roseburia | 90% | 100% | Ascusb_7921 | SEQ ID | 0.86201 |
| incertae sedis (Family) | intestinalis | | | intestinalis | | | | NO: 30 | |
| Succinivibrio | Succinivibrio | 95% | 99% | Succinivibrio | 95% | 99% | Ascusb_11 | SEQ ID | 0.50001 |
| (Genus) | dextrinosolvens | | | dextrinosolvens | | | | NO: 2045 | |
| Prevotella | Bacterium | 100% | 93% | Prevotella | 91% | | Ascusb_36 | SEQ ID | 0.55431 |
| (Genus) | MB2027 | | | ruminicola | | | | NO: 2046 | |
| Prevotella | Prevotella | 100% | 99% | Prevotella | 100% | | Ascusb_67 | SEQ ID | 0.49156 |
| (Genus) | ruminicola | | | ruminicola | | | | NO: 2047 | |
| Prevotella | Prevotella | 97% | 100% | Prevotella | 97% | 100% | Ascusb_87 | SEQ ID | 0.59635 |
| (Genus) | ruminicola | | | ruminicola | | | | NO: 2048 | |
| Ruminobacter | Ruminobacter sp. | 92% | 99% | Ruminobacter | 92% | 100% | Ascusb_101 | SEQ ID | 0.75099 |
| (Genus) | | | | amylophilus | | | | NO: 2049 | |
| Syntrophococcus | Blautia producta | 91% | 100% | Blautia producta | 91% | 100% | Ascusb_104 | SEQ ID | 0.70044 |
| (Genus) | | | | | | | | NO: 2050 | |
| Succinivibrio | Succinivibrio | 96% | 99% | Succinivibrio | 96% | 99% | Ascusb_125 | SEQ ID | 0.44408 |
| (Genus) | dextrinosolvens | | | dextrinosolvens | | | | NO: 2051 | |
| Pseudobutyrivibrio | Butyrivibrio | 99% | 100% | Butyrivibrio | 99% | 100% | Ascusb_149 | SEQ ID | 0.50676 |
| (Genus) | fibrisolvens | | | fibrisolvens | | | | NO: 2052 | |
| Prevotella | Prevotella | 99% | 99% | Prevotella | 99% | 99% | Ascusb_159 | SEQ ID | 0.5744 |
| (Genus) | ruminicola | | | ruminicola | | | | NO: 2053 | |
| Prevotella | Prevotella | 96% | 99% | Prevotella | 96% | 99% | Ascusb_183 | SEQ ID | 0.50204 |
| (Genus) | ruminicola | | | ruminicola | | | | NO: 2054 | |
| Prevotella | Prevotella | 99% | 100% | Prevotella | 99% | 100% | Ascusb_187 | SEQ ID | 0.56688 |
| (Genus) | ruminicola | | | ruminicola | | | | NO: 2055 | |
| Prevotella | Bacterium XBB2006 | 100% | 94% | Prevotella albensis | 87% | 97% | Ascusb_190 | SEQ ID | 0.56183 |
| (Genus) | | | | | | | | NO: 2056 | |
| Lachnospiraceae | Lachnospiraceae | 91% | 100% | Roseburia | 89% | 100% | Ascusb_199 | SEQ ID | 0.62487 |
| incertae sedis (Family) | bacterium | | | inulinivorans | | | | NO: 2057 | |
| Syntrophococcus | Ruminococcus | 95% | 100% | Ruminococcus | 95% | 100% | Ascusb_278 | SEQ ID | 0.51235 |
| (Genus) | gnavus | | | gnavus | | | | NO: 2058 | |
| Ruminobacter | Ruminobacter sp. | 100% | 99% | Ruminobacter | 99% | 100% | Ascusb_329 | SEQ ID | 0.4754 |
| (Genus) | | | | amylophilus | | | | NO: 2059 | |
| Butyrivibrio | Butyrivibrio sp. | 100% | 100% | Butyrivibrio | 99% | 98% | Ascusb_368 | SEQ ID | 0.60727 |
| (Genus) | | | | hungatei | | | | NO: 2060 | |
| Clostridium_XlVa | Eubacterium | 100% | 96% | Eubacterium | 100% | 96% | Ascusb_469 | SEQ ID | 0.66345 |
| (Cluster) | oxidoreducens | | | oxidoreducens | | | | NO: 2061 | |
| Prevotella | Rumen bacterium | 99% | 99% | Prevotella brevis | 91% | 100% | Ascusb_530 | SEQ ID | 0.44804 |
| (Genus) | NK4A111 | | | | | | | NO: 2062 | |
| Prevotella | Prevotella sp. | 100% | 93% | Prevotella copri | 100% | 93% | Ascusb_728 | SEQ ID | 0.55431 |
| (Genus) | | | | | | | | NO: 2063 | |
| Lachnospiraceae | Eubacterium | 99% | 100% | Eubacterium | 99% | 100% | Ascusb_756 | SEQ ID | 0.72136 |
| incertae sedis (Family) | ruminantium | | | ruminantium | | | | NO: 2064 | |
| Roseburia | Lachnospiraceae | 89% | 93% | [Clostridium] | 89% | 91% | Ascusb_810 | SEQ ID | 0.65527 |
| (Genus) | bacterium | | | xylanovorans | | | | NO: 2065 | |
| Lachnospiraceae | Lachnospira | 99% | 100% | Lachnospira | 99% | 100% | Ascusb_817 | SEQ ID | 0.46512 |
| incertae sedis (Family) | pectinoschiza | | | pectinoschiza | | | | NO: 2066 | |
| Butyrivibrio | Butyrivibrio | 98% | 99% | Butyrivibrio | 98% | 99% | Ascusb_826 | SEQ ID | 0.65357 |
| (Genus) | fibrisolvens | | | fibrisolvens | | | | NO: 2067 | |
| Pseudobutyrivibrio | Pseudobutyrivibrio | 100% | 95% | Pseudobutyrivibrio | 97% | 100% | Ascusb_880 | SEQ ID | 0.52295 |
| (Genus) | sp. | | | ruminis | | | | NO: 2068 | |
| Turicibacter | Sinimarinibacterium | 87% | 69% | Sinimarinibacterium | 87% | 69% | Ascusb_913 | SEQ ID | 0.55141 |
| (Genus) | flocculans | | | flocculans | | | | NO: 2069 | |
| Lachnospiraceae | Bacterium | 100% | 91% | Butyrivibrio | 90% | 100% | Ascusb_974 | SEQ ID | 0.53487 |
| incertae sedis (Family) | FB3002 | | | fibrisolvens | | | | NO: 2070 | |
| Pseudobutyrivibrio | Pseudobutyrivibrio | 97% | 99% | Pseudobutyrivibrio | 97% | 99% | Ascusb_1069 | SEQ ID | 0.55299 |
| (Genus) | ruminis | | | ruminis | | | | NO: 2071 | |
| Anaerolinea | Chloroflexi | 88% | 99% | Anaerolinea | 90% | 57% | Ascusb_1074 | SEQ ID | 0.50893 |
| (Genus) | bacterium | | | thermophila | | | | NO: 2072 | |
| Roseburia | Lachnospiraceae | 98% | 99% | Eubacterium rectale | 94% | 100% | Ascusb_1293 | SEQ ID | 0.61745 |
| (Genus) | | | | | | | | NO: 2073 | |
| Propionibacterium | Propionibacterium | 100% | 100% | Propionibacterium | 100% | 100% | Ascusb_1367 | SEQ ID | 0.54046 |
| (Genus) | acnes | | | acnes | | | | NO: 2074 | |
| Clostridium_XIVa | Lachnospiraceae | 88% | 100% | Pseudobutyrivibrio | 86% | 97% | Ascusb_1632 | SEQ ID | 0.46826 |
| (Cluster) | bacterium | | | ruminis | | | | NO: 2075 | |
| Olsenella | Coriobacteriaceae | 98% | 100% | Olsenella profusa | 97% | 100% | Ascusb_1674 | SEQ ID | 0.51533 |
| (Genus) | bacterium | | | | | | | NO: 2076 | |
| Streptococcus | Streptococcus | 95% | 82% | Streptococcus | 95% | 82% | Ascusb_1786 | SEQ ID | 0.48678 |
| (Genus) | dentirousetti | | | dentirousetti | | | | NO: 2077 | |
| Clostridium_XlVa | Butyrivibrio sp. | 99% | 96% | Butyrivibrio | 93% | 100% | Ascusb_1812 | SEQ ID | 0.64367 |
| (Cluster) | | | | proteoclasticus | | | | NO: 2078 | |
| Clostridium_XlVa | Bacterium | 99% | 91% | Butyrivibrio | 96% | 99% | Ascusb_1850 | SEQ ID | 0.57807 |
| (Cluster) | DAZ2002 | | | hungatei | | | | NO: 2079 | |
| Roseburia | Lachnospiraceae | 95% | 99% | Eubacterium | 89% | 100% | Ascusb_1879 | SEQ ID | 0.45014 |
| (Genus) | bacterium | | | oxidoreducens | | | | NO: 2080 | |
| Clostridium_IV | Ruminococcaceae | 87% | 99% | Ruminococcus | 85% | 91% | Ascusb_2090 | SEQ ID | 0.75266 |
| (Cluster) | bacterium | | | bromii | | | | NO: 2081 | |
| Clostridium_XICa | Bacterium | 99% | 99% | Clostridium | 85% | 90% | Ascusb_2124 | SEQ ID | 0.4673 |
| (Cluster) | MA2020 | | | algidixylanolyticum | | | | NO: 2082 | |
| Lachnospiracea | Bacterium | 94% | 94% | Eubacterium | 91% | 100% | Ascusb_2198 | SEQ ID | 0.55249 |
| incertae sedis (Family) | YSB2008 | | | ruminantium | | | | NO: 2083 | |
| Erysipelotrichaceae | Catenisphaera | 90% | 91% | Catenisphaera | 90% | 91% | Ascusb_2511 | SEQ ID | 0.50619 |
| incertae sedis (Family) | adipataccumulans | | | adipataccumulans | | | | NO: 2084 | |
| Solobacterium | Erysipelotrichaceae | 92% | 99% | Solobacterium | 91% | 100% | Ascusb_2530 | SEQ ID | 0.53735 |
| (Genus) | bacterium | | | moorei | | | | NO: 2085 | |
| Lachnospiraceae | Eubacterium | 95% | 100% | Eubacterium | 95% | 100% | Ascusb_2597 | SEQ ID | 0.52028 |
| incertae sedis (Genus) | ruminantium | | | ruminantium | | | | NO: 2086 | |
| Clostridium_XlVa | Butyrivibrio | 99% | 100% | Butyrivibrio | 99% | 100% | Ascusb_2624 | SEQ ID | 0.55465 |
| (Cluster) | proteoclasticus | | | proteoclasticus | | | | NO: 2087 | |
| Ralstonia | Ralstonia sp. 94 | 100% | 99% | Ralsonia insidiosa | 99% | 100% | Ascusb_2667 | SEQ ID | 0.52371 |
| (Genus) | | | | | | | | NO: 2088 | |
| Clostridium_XlVa | Butyrivibrio sp. | 97% | 94% | Butyrivibrio | 95% | 100% | Ascusb_2836 | SEQ ID | 0.43374 |
| (Cluster) | | | | proteoclasticus | | | | NO: 2089 | |
| Eubacterium | Eubacteriaceae | 84% | 100% | Casaltella | 87% | 82% | Ascusb_3003 | SEQ ID | 0.56301 |
| (Genus) | bacterium | | | massiliensis | | | | NO: 2090 | |
| Lachnobacterium | Rumen bacterium | 89% | 98% | Eubacterium | 90% | 91% | Ascusb_3504 | SEQ ID | 0.52856 |
| (Genus) | | | | xylanophilum | | | | NO: 2091 | |
| Acholeplasma | Acholeplasma | 86% | 72% | Acholeplasma | 86% | 72% | Ascusb_3881 | SEQ ID | 0.4402 |
| (Genus) | brassicae | | | brassicae | | | | NO: 2092 | |
| Selenomonas | Mitsuokella | 91% | 97% | Mitsuokella | 91% | 97% | Ascusb_4728 | SEQ ID | 0.4761 |
| (Genus) | jalaludinii | | | jalaludinii | | | | NO: 2093 | |
| Prevotella | Prevotella | 98% | 100% | Prevotella | 98% | 100% | Ascusb_4934 | SEQ ID | 0.56204 |
| (Genus) | ruminicola | | | ruminicola | | | | NO: 2094 | |
| Clostridium_XlVa | Butyrivibrio sp. | 99% | 99% | Butyrivibrio | 97% | 100% | Ascusb_4959 | SEQ ID | 0.42892 |
| (Cluster) | | | | fibrisolvens | | | | NO: 2095 | |
| Succinivibrio | Succinivibrio | 86% | 84% | Succinivibrio | 86% | 84% | Ascusb_5525 | SEQ ID | 0.51758 |
| (Genus) | dextrinosolvens | | | dextrinosolvens | | | | NO: 2096 | |
| Ruminobacter | Ruminobacter sp. | 100% | 99% | Ruminobacter | 99% | 100% | Ascusb_12103 | SEQ ID | 0.52909 |
| (Genus) | | | | amylophilus | | | | NO: 2097 | |
| Sharpea | Lachnospiraceae | 97% | 100% | Sharpea azabuensis | 100% | 91% | Ascusb_14245 | SEQ ID | 0.61391 |
| (Genus) | bacterium | | | | | | | NO: 2098 | |
| Prevotella | Prevotella | 87% | 97% | Prevotella | 87% | 97% | Ascusb_14945 | SEQ ID | 0.80101 |
| (Genus) | ruminicola | | | ruminicola | | | | NO: 2099 | |
| Prevotella | Prevotella sp. | 88% | 89% | Prevotella | 87% | 945 | Ascusb_17461 | SEQ ID | 0.44777 |
| (Genus) | DJF | | | ruminicola | | | | NO: 2100 | |
| Prevotella | Bacterium | 100% | 93% | Prevotella | 91% | 99% | Ascusb_20083 | SEQ ID | 0.52538 |
| (Genus) | MB2027 | | | ruminicola | | | | NO: 2101 | |
| Prevotella | Prevotella | 99% | 100% | Prevotella | 99% | 100% | Ascusb_20187 | SEQ ID | 0.59156 |
| (Genus) | ruminicola | | | ruminicola | | | | NO: 2102 | |
| Prevotella | Prevotella | 100% | 100% | Prevotella | 100% | 100% | Ascusb_20539 | SEQ ID | 0.4912 |
| (Genus) | ruminicola | | | ruminicola | | | | NO: 2103 | |
| Piromyces | Piromyces sp. | 93% | 100% | Neocallimastix | 84% | 100% | Ascusf_11 | SEQ ID | 0.81719 |
| (Genus) | | | | frontalis | | | | NO: 31 | |
| Candida xylopsoc | Pichia kudriavzevii | 100% | 100% | Pichia kudriavzevii | 100% | 100% | Ascusf_15 | SEQ ID | 0.76088 |
| (Genus + Species) | | | | | | | | NO: 32 | |
| Orpinomyces | Orpinomyces sp. | 100% | 100% | Neocallimastix | 86% | 100% | Ascusf_22 | SEQ ID | 0.76806 |
| (Genus) | | | | frontalis | | | | NO: 33 | |
| Orpinomycs | Neocallimastix | 86% | 80% | Neocallimastix | 86% | 80% | Ascusf_23 | SEQ ID | 0.85707 |
| (Genus) | frontalis | | | frontalis | | | | NO: 34 | |
| Orpinomyces | Orpinomyces sp. | 95% | 100% | Neocallimastix | 86% | 100% | Ascusf_24 | SEQ ID | 0.85292 |
| (Genus) | | | | frontalis | | | | NO: 35 | |
| Candida apicol | Candida apicola | 100% | 100% | Candida apicola | 100% | 100% | Ascusf_25 | SEQ ID | 0.70561 |
| (Genus + Species) | | | | | | | | NO: 36 | |
| Candida rugosa | Candida | 100% | 100% | Candida | 100% | 100% | Ascusf_38 | SEQ ID | 0.78246 |
| (Genus + Species) | akabanensis | | | akabanensis | | | | NO: 37 | |
| Neocallimastix | Neocallimastix sp. | 99% | 100% | Neocallimastix | 99% | 100% | Ascusf_45 | SEQ ID | 0.86185 |
| (Genus) | | | | frontalis | | | | NO: 38 | |
| Orpinomyces | Orpinomyces sp. | 99% | 100% | Orpinomyces | 96% | 96% | Ascusf_60 | SEQ ID | 0.72985 |
| (Genus) | | | | joyonii | | | | NO: 39 | |
| Orpinomyces | Neocallimastix | 86% | 78% | Neocallimastix | 86% | 78% | Ascusf_73 | SEQ ID | 0.76064 |
| (Genus) | frontalis | | | frontalis | | | | NO: 40 | |
| Neocallimastix | Neocallimastix sp. | 98% | 100% | Neocallimastix | 93% | 100% | Ascusf_77 | SEQ ID | 0.83475 |
| (Genus) | | | | frontalis | | | | NO: 41 | |
| Neocallimastix | Neocallimastix | 97% | 100% | Neocallimastix | 97% | 100% | Ascusf_94 | SEQ ID | 0.77644 |
| (Genus) | frontalis | | | frontalis | | | | NO: 42 | |
| Ascomycota | Basidiomycota sp. | 85% | 98% | Sugiyamaella | 97% | 26% | Ascusf_95 | SEQ ID | 0.7089 |
| (Genus) | | | | lignohabitans | | | | NO: 43 | |
| Piromyces | Caecomyces sp. | 94% | 100% | Cyllamyces | 86% | 89% | Ascusf_108 | SEQ ID | 0.68405 |
| (Genus) | | | | aberensis | | | | NO: 44 | |
| Orpinomyces | Orpinomyces sp. | 95% | 100% | Orpinomyces | 87% | 96% | Ascusf_119 | SEQ ID | 0.80055 |
| (Genus) | | | | joyonii | | | | NO: 45 | |
| Cyllamyces | Caecomyces sp. | 90% | 100% | Caecomyces | 90% | 83% | Ascusf_127 | SEQ ID | 0.66812 |
| (Genus) | | | | communis | | | | NO: 46 | |
| Piromyces | Caecomyces sp. | 91% | 100% | Caecomyces | 92% | 83% | Ascusf_136 | SEQ ID | 0.73201 |
| (Genus) | | | | communis | | | | NO: 47 | |
| Cyllamyces | Cyllamyces sp. | 97% | 100% | Cyllamyces | 94% | 89% | Ascusf_193 | SEQ ID | 0.7586 |
| (Genus) | | | | aberensis | | | | NO: 48 | |
| Piromyces | Piromyces sp. | 92% | 100% | Neocallimastix | 84% | 100% | Ascusf_228 | SEQ ID | 0.83403 |
| (Genus) | | | | frontalis | | | | NO: 49 | |
| Piromyces | Caecomyces sp. | 94% | 100% | Cyllamyces | 86% | 89% | Ascusf_249 | SEQ ID | 0.78679 |
| (Genus) | | | | aberensis | | | | NO: 50 | |
| Neocallimastix | Neocallimastix sp. | 98% | 100% | Neocallimastix | 92% | 100% | Ascusf_307 | SEQ ID | 0.77859 |
| (Genus) | | | | frontalis | | | | NO: 51 | |
| Piromyces | Piromyces sp. | 94% | 100% | Neocallimastix | 83% | 100% | Ascusf_315 | SEQ ID | 0.81028 |
| (Genus) | | | | frontalis | | | | NO: 52 | |
| Neocallimastix | Neocallimastix sp. | 100% | 98% | Neocallimastix | 100% | 90% | Ascusf_334 | SEQ ID | 0.76456 |
| (Genus) | | | | frontalis | | | | NO: 53 | |
| Saccharomycetales | Candida ethanolica | 100% | 100% | Candida ethanolica | 100% | 100% | Ascusf_353 | SEQ ID | 0.82628 |
| (Order) | | | | | | | | NO: 54 | |
| Piromyces | Piromyces sp. | 91% | 100% | Neocallimastix | 83% | 100% | Ascusf_448 | SEQ ID | 0.70021 |
| (Genus) | | | | frontalis | | | | NO: 55 | |
| Orpinomyces | Neocallimastix sp. | 88% | 91% | Neocallimastix | 96% | 88% | Ascusf_786 | SEQ ID | 0.63201 |
| (Genus) | | | | frontalis | | | | NO: 56 | |
| Piromyces | Piromyces sp. | 91% | 100% | Neocallimastix | 83% | 100% | Ascusf_836 | SEQ ID | 0.65492 |
| (Genus) | | | | frontalis | | | | NO: 57 | |
| Phyllosticta | Tremellales sp. | 96% | 74% | Tremella giraffa | 83% | 96% | Ascusf_923 | SEQ ID | 0.76115 |
| capitalensis | | | | | | | | NO: 58 | |
| (Genus + Species) | | | | | | | | | |
| Orpinomyces | Neocallimastix | 87% | 77% | Neocallimastix | 87% | 77% | Ascusf_1020 | SEQ ID | 0.68043 |
| (Genus) | frontalis | | | frontalis | | | | NO: 59 | |
| Orpinomyces | Neocallimastix | 85% | 80% | Neocallimastix | 85% | 80% | Ascusf_1103 | SEQ ID | 0.73004 |
| (Genus) | frontalis | | | frontalis | | | | NO: 60 | |
| Orpinomyces | Fungal sp. | 99% | 100% | Orpinomyces | 94% | 96% | Ascusf_81 | SEQ ID | 0.44471 |
| (Genus) | Tianzhu-Yak6 | | | joyonii | | | | NO: 2104 | |
| Piromyces | Piromyces sp. | 99% | 100% | Neocallimastix | 84% | 100% | Ascusf_206 | SEQ ID | 0.49752 |
| (Genus) | | | | frontalis | | | | NO: 2105 | |
| Piromyces | Piromyces sp. | 96% | 100% | Neocallimastix | 82% | 100% | Ascusf_208 | SEQ ID | 0.4176 |
| (Genus) | | | | frontalis | | | | NO: 2106 | |
| Piromyces | Piromyces sp. | 99% | 100% | Neocallimastix | 82% | 100% | Ascusf_1012 | SEQ ID | 0.55922 |
| (Genus) | | | | frontalis | | | | NO: 2107 | |

TABLE 2
Microbial Deposits Corresponding to the Microbes of Table 1

| Predicted Taxa | | | | Predicted Taxa | | | |
|---|---|---|---|---|---|---|---|
| of Isolated | Strain | Sequence | | of Isolated | Strain | Sequence | |
| Microbes | Designation | Identifier | Deposit No. | Microbes | Designation | Identifier | Deposit No. |
| Ruminococcus | Ascusb_5 | SEQ ID | PATENT201612001, | Streptococcus | Ascusb_1786 | SEQ ID | PATENT201612011, |
| bovis sp. nov. | (consortia) | NO: 1 | PATENT201612007, | (Genus) | | NO: 2077 | PATENT201612012, |
| (Species - Not | | | PATENT201612009, | | | | PATENT201612013 |
| predicted, rather a | | | PATENT201612010, | | | | |
| new species) | | | PATENT201612011, | | | | |
| | | | PATENT201612012 | | | | |
| Ruminococcus | Ascusb_5 | SEQ ID | PTA-125917¹ | Clostridium_XlVa | Ascusb_1812 | SEQ ID | PATENT201612011, |
| bovis sp. nov. | (pure | NO: 2108 | NARRL B-67764² | (Cluster) | | NO: 2078 | PATENT201612012 |
| (Species - Not | culture) | | TSD-225³ | | | | |
| predicted, rather a | | | NCTC 14479⁴ | | | | |
| new species) | | | | | | | |
| Ruminococcus | Ascusb_7 | SEQ ID | PATENT201612005, | Clostridium_XlVa | Ascusb_1850 | SEQ ID | PATENT201612013 |
| (Genus) | | NO: 2 | PATENT201612007, | (Cluster) | | NO: 2079 | |
| | | | PATENT201612009, | | | | |
| | | | PATENT201612010, | | | | |
| | | | PATENT201612011, | | | | |
| | | | PATENT201612012, | | | | |
| | | | PATENT201612013 | | | | |
| Clostridium IV | Ascusb_26 | SEQ ID | PATENT201612005, | Roseburia | Ascusb_1879 | SEQ ID | |
| (Cluster) | | NO: 3 | PATENT201612009, | (Genus) | | NO: 2080 | |
| | | | PATENT201612011, | | | | |
| | | | PATENT201612012 | | | | |
| Roseburia | Ascusb_27 | SEQ ID | PATENT201612009 | Clostridium_IV | Ascusb_2090 | SEQ ID | PATENT201612007, |
| (Genus) | | NO: 4 | | (Cluster) | | NO: 2081 | PATENT201612009 |
| Hydrogenoanaero- | Ascusb_32 | SEQ ID | PATENT201612006, | Clostridium_XICa | Ascusb_2124 | SEQ ID | PATENT201612012 |
| bacterium (Genus) | | NO: 5 | PATENT201612009, | (Cluster) | | NO: 2082 | |
| | | | PATENT201612012 | | | | |
| Clostridium XIVa | Ascusb_79 | SEQ ID | PATENT201612011, | Lachnospiracea | Ascusb_2198 | SEQ ID | PATENT201612012 |
| (Cluster) | | NO: 6 | PATENT201612012 | incertae sedis | | NO: 2083 | |
| | | | | (Family) | | | |
| Saccharofermentans | Ascusb_82 | SEQ ID | PATENT201612005, | Erysipelotrichaceae | Ascusb_2511 | SEQ ID | PATENT201612001, |
| (Genus) | | NO: 7 | PATENT201612006, | incertae sedis | | NO: 2084 | PATENT201612007, |
| | | | PATENT201612007, | (Family) | | | PATENT201612009 |
| | | | PATENT201612009, | | | | |
| | | | PATENT201612010, | | | | |
| | | | PATENT201612012 | | | | |
| Saccharofermentans | Ascusb_102 | SEQ ID | PATENT201612005, | Solobacterium | Ascusb_2530 | SEQ ID | PATENT201612011, |
| (Genus) | | NO: 8 | PATENT201612007, | (Genus) | | NO: 2085 | PATENT201612012 |
| | | | PATENT201612010, | | | | |
| | | | PATENT201612011, | | | | |
| | | | PATENT201612012 | | | | |
| Butyricicoccus | Ascusb_89 | SEQ ID | PATENT201612011, | Lachnospiraceae | Ascusb_2597 | SEQ ID | PATENT201612013 |
| (Genus) | | NO: 9 | PATENT201612012 | incertae sedis | | NO: 2086 | |
| | | | | (Genus) | | | |
| Papillibacter | Ascusb_111 | SEQ ID | PATENT201612005, | Clostridium_XlVa | Ascusb_2624 | SEQ ID | PATENT201612009, |
| (Genus) | | NO: 10 | PATENT201612007, | (Cluster) | | NO: 2087 | PATENT201612011, |
| | | | PATENT201612012 | | | | PATENT201612012 |
| Ruminococcus | Ascusb_119 | SEQ ID | PATENT201612011, | Ralstonia | Ascusb_2667 | SEQ ID | PATENT201612013 |
| (Genus) | | NO: 11 | PATENT201612012 | (Genus) | | NO: 2088 | |
| Hydrogenoanaero- | Ascusb_145 | SEQ ID | PATENT201612011, | Clostridium_XlVa | Ascusb_2836 | SEQ ID | PATENT201612013 |
| bacterium (Genus) | | NO: 12 | PATENT201612012 | (Cluster) | | NO: 2089 | |
| Pelotomaculum | Ascusb_205 | SEQ ID | PATENT201612005, | Eubacterium | Ascusb_3003 | SEQ ID | PATENT201612009 |
| (Genus) | | NO: 13 | PATENT201612006, | (Genus) | | NO: 2090 | |
| | | | PATENT201612011, | | | | |
| | | | PATENT201612012 | | | | |
| Saccharofermentans | Ascusb_232 | SEQ ID | PATENT201612010, | Lachnobacterium | Ascusb_3504 | SEQ ID | PATENT201612011, |
| (Genus) | | NO: 14 | PATENT201612011, | (Genus) | | NO: 2091 | PATENT201612012 |
| | | | PATENT201612012 | | | | |
| Lachnospiraceae | Ascusb_252 | SEQ ID | | Acholeplasma | Ascusb_3881 | SEQ ID | PATENT201612007 |
| incertae sedis | | NO: 15 | | (Genus) | | NO: 2092 | |
| (Family) | | | | | | | |
| Butyricicoccus | Ascusb_268 | SEQ ID | PATENT201612007, | Selenomonas | Ascusb_4728 | SEQ ID | |
| sensu stricto | | NO: 16 | PATENT201612011, | (Genus) | | NO: 2093 | |
| (Genus) | | | PATENT201612012 | | | | |
| Lachnospiraceae | Ascusb_374 | SEQ ID | PATENT201612007, | Prevotella | Ascusb_4934 | SEQ ID | |
| incertae sedis | | NO: 17 | PATENT201612009, | (Genus) | | NO: 2094 | |
| (Family) | | | PATENT201612010, | | | | |
| | | | PATENT201612011 | | | | |
| | | | PATENT201612012 | | | | |
| Anaeroplasma | Ascusb_411 | SEQ ID | PATENT201612007, | Clostridium_XlVa | Ascusb_4959 | SEQ ID | |
| (Genus) | | NO: 18 | PATENT201612011, | (Cluster) | | NO: 2095 | |
| | | | PATENT201612012 | | | | |
| Clostridium sensu | Ascusb_546 | SEQ ID | PATENT201612013 | Succinivibrio | Ascusb_5525 | SEQ ID | |
| stricto (Genus) | | NO: 19 | | (Genus) | | NO: 2096 | |
| Butyricicoccus | Ascusb_672 | SEQ ID | | Ruminobacter | Ascusb_12103 | SEQ ID | PATENT201612001 |
| (Genus) | | NO: 20 | | (Genus) | | NO: 2097 | |
| Butyricicoccus | Ascusb_765 | SEQ ID | PATENT201612013 | Sharpea | Ascusb_14245 | SEQ ID | PATENT201612001, |
| (Genus) | | NO: 21 | | (Genus) | | NO: 2098 | PATENT201612008, |
| | | | | | | | PATENT201612009, |
| | | | | | | | PATENT201612011, |
| | | | | | | | PATENT201612012, |
| | | | | | | | PATENT201612013 |
| Rikenella | Ascusb_812 | SEQ ID | PATENT201612005, | Prevotella | Ascusb_14945 | SEQ ID | |
| (Genus) | | NO: 22 | PATENT201612006, | (Genus) | | NO: 2099 | |
| | | | PATENT201612011, | | | | |
| | | | PATENT201612012 | | | | |
| Tannerella | Ascusb_1295 | SEQ ID | PATENT201612007, | Prevotella | Ascusb_17461 | SEQ ID | |
| (Genus) | | NO: 23 | PATENT201612009, | (Genus) | | NO: 2100 | |
| | | | PATENT201612011, | | | | |
| | | | PATENT201612012 | | | | |
| Howardella | Ascusb_1763 | SEQ ID | PATENT201612011, | Prevotella | Ascusb_20083 | SEQ ID | PATENT201612006 |
| (Genus) | | NO: 24 | PATENT201612012 | (Genus) | | NO: 2101 | |
| Prevotella | Ascusb_1780 | SEQ ID | PATENT201612013 | Prevotella | Ascusb_20187 | SEQ ID | PATENT201612009, |
| (Genus) | | NO: 25 | | (Genus) | | NO: 2102 | PATENT201612011, |
| | | | | | | | PATENT201612012 |
| Butyricimonas | Ascusb_1801 | SEQ ID | PATENT201612005 | Prevotella | Ascusb_20539 | SEQ ID | |
| (Genus) | | NO: 26 | | (Genus) | | NO: 2103 | |
| Clostridium sensu | Ascusb_1833 | SEQ ID | PATENT201612006, | Piromyces | Ascusf_11 | SEQ ID | |
| stricto | | NO: 27 | PATENT201612007, | (Genus) | | NO: 31 | |
| (Genus) | | | PATENT201612009, | | | | |
| | | | PATENT201612010, | | | | |
| | | | PATENT201612011, | | | | |
| | | | PATENT201612012 | | | | |
| Clostridium sensu | Ascusb_3138 | SEQ ID | PATENT201612005, | Candida xylopsoc | Ascusf_15 | SEQ ID | NRRL Y-67249, |
| stricto | | NO: 28 | PATENT201612006, | (Genus + Species) | | NO: 32 | PATENT201612014 |
| (Genus) | | | PATENT201612008, | | | | |
| | | | PATENT201612009, | | | | |
| | | | PATENT201612010, | | | | |
| | | | PATENT201612011, | | | | |
| | | | PATENT201612012, | | | | |
| | | | PATENT201612013, | | | | |
| | | | NRRL B-67248 | | | | |
| Saccharofermentans | Ascusb_6589 | SEQ ID | PATENT201612005 | Orpinomyces | Ascusf_22 | SEQ ID | PATENT201612002, |
| (Genus) | | NO: 29 | | (Genus) | | NO: 33 | PATENT201612004 |
| Lachnospiraceae | Ascusb_7921 | SEQ ID | | Orpinomycs | Ascusf_23 | SEQ ID | PATENT201612014 |
| incertae sedis | | NO: 30 | | (Genus) | | NO: 34 | |
| (Family) | | | | | | | |
| Succinivibrio | Ascusb_11 | SEQ ID | PATENT201612001, | Orpinomyces | Ascusf_24 | SEQ ID | PATENT201612002, |
| (Genus) | | NO: 2045 | PATENT201612008, | (Genus) | | NO: 35 | PATENT201612004 |
| | | | PATENT201612009, | | | | |
| | | | PATENT201612011, | | | | |
| | | | PATENT201612012 | | | | |
| Prevotella | Ascusb_36 | SEQ ID | PATENT201612013 | Candida apicol | Ascusf_25 | SEQ ID | PATENT201612014 |
| (Genus) | | NO: 2046 | | (Genus + Species) | | NO: 36 | |
| Prevotella | Ascusb_67 | SEQ ID | | Candida rugosa | Ascusf_38 | SEQ ID | PATENT201612004 |
| (Genus) | | NO: 2047 | | (Genus + Species) | | NO: 37 | |
| Prevotella | Ascusb_87 | SEQ ID | | Neocallimastix | Ascusf_45 | SEQ ID | PATENT201612002, |
| (Genus) | | NO: 2048 | | (Genus) | | NO: 38 | PATENT201612014 |
| Ruminobacter | Ascusb_101 | SEQ ID | PATENT201612001, | Orpinomyces | Ascusf_60 | SEQ ID | |
| (Genus) | | NO: 2049 | PATENT201612005, | (Genus) | | NO: 39 | |
| | | | PATENT201612011, | | | | |
| | | | PATENT201612012 | | | | |
| Syntrophococcus | Ascusb_104 | SEQ ID | PATENT201612005, | Orpinomyces | Ascusf_73 | SEQ ID | |
| (Genus) | | NO: 2050 | PATENT201612006 | (Genus) | | NO: 40 | |
| Succinivibrio | Ascusb_125 | SEQ ID | PATENT201612001, | Neocallimastix | Ascusf_77 | SEQ ID | PATENT201612014 |
| (Genus) | | NO: 2051 | PATENT201612005, | (Genus) | | NO: 41 | |
| | | | PATENT201612006, | | | | |
| | | | PATENT201612008, | | | | |
| | | | PATENT201612009, | | | | |
| | | | PATENT201612011, | | | | |
| | | | PATENT201612012 | | | | |
| Pseudobutyrivibrio | Ascusb_149 | SEQ ID | PATENT201612001, | Neocallimastix | Ascusf_94 | SEQ ID | PATENT201612014 |
| (Genus) | | NO: 2052 | PATENT201612008, | (Genus) | | NO: 42 | |
| | | | PATENT201612009, | | | | |
| | | | PATENT201612011, | | | | |
| | | | PATENT201612012, | | | | |
| | | | PATENT201612013 | | | | |
| Prevotella | Ascusb_159 | SEQ ID | PATENT201612005, | Ascomycota | Ascusf_95 | SEQ ID | |
| (Genus) | | NO: 2053 | PATENT201612006, | (Genus) | | NO: 43 | |
| | | | PATENT201612007, | | | | |
| | | | PATENT201612008, | | | | |
| | | | PATENT201612009, | | | | |
| | | | PATENT201612010, | | | | |
| | | | PATENT201612011, | | | | |
| | | | PATENT201612012 | | | | |
| Prevotella | Ascusb_183 | SEQ ID | PATENT201612008, | Piromyces | Ascusf_108 | SEQ ID | PATENT201612014 |
| (Genus) | | NO: 2054 | PATENT201612009 | (Genus) | | NO: 44 | |
| Prevotella | Ascusb_187 | SEQ ID | PATENT201612007, | Orpinomyces | Ascusf_119 | SEQ ID | |
| (Genus) | | NO: 2055 | PATENT201612008, | (Genus) | | NO: 45 | |
| | | | PATENT201612010, | | | | |
| | | | PATENT201612011, | | | | |
| | | | PATENT201612012 | | | | |
| Prevotella | Ascusb_190 | SEQ ID | PATENT201612005, | Cyllamyces | Ascusf_127 | SEQ ID | |
| (Genus) | | NO: 2056 | PATENT201612006, | (Genus) | | NO: 46 | |
| | | | PATENT201612007, | | | | |
| | | | PATENT201612012 | | | | |
| Lachnospiraceae | Ascusb_199 | SEQ ID | PATENT201612011, | Piromyces | Ascusf_136 | SEQ ID | |
| incertae sedis | | NO: 2057 | PATENT201612012 | (Genus) | | NO: 47 | |
| (Family) | | | | | | | |
| Syntrophococcus | Ascusb_278 | SEQ ID | PATENT201612008 | Cyllamyces | Ascusf_193 | SEQ ID | |
| (Genus) | | NO: 2058 | | (Genus) | | NO: 48 | |
| Ruminobacter | Ascusb_329 | SEQ ID | PATENT201612010 | Piromyces | Ascusf_228 | SEQ ID | |
| (Genus) | | NO: 2059 | | (Genus) | | NO: 49 | |
| Butyrivibrio | Ascusb_368 | SEQ ID | PATENT201612011, | Piromyces | Ascusf_249 | SEQ ID | |
| (Genus) | | NO: 2060 | PATENT201612012 | (Genus) | | NO: 50 | |
| Clostridium_XlVa | Ascusb_469 | SEQ ID | | Neocallimastix | Ascusf_307 | SEQ ID | PATENT201612002, |
| (Cluster) | | NO: 2061 | | (Genus) | | NO: 51 | PATENT201612014 |
| Prevotella | Ascusb_530 | SEQ ID | | Piromyces | Ascusf_315 | SEQ ID | |
| (Genus) | | NO: 2062 | | (Genus) | | NO: 52 | |
| Prevotella | Ascusb_728 | SEQ ID | PATENT201612008, | Neocallimastix | Ascusf_334 | SEQ ID | PATENT201612014 |
| (Genus) | | NO: 2063 | PATENT201612009, | (Genus) | | NO: 53 | |
| | | | PATENT201612011, | | | | |
| | | | PATENT201612012, | | | | |
| | | | PATENT201612013 | | | | |
| Lachnospiraceae | Ascusb_756 | SEQ ID | | Saccharomycetales | Ascusf_353 | SEQ ID | PATENT201612014 |
| incertae sedis | | NO: 2064 | | (Order) | | NO: 54 | |
| (Family) | | | | | | | |
| Roseburia | Ascusb_810 | SEQ ID | PATENT201612011, | Piromyces | Ascusf_448 | SEQ ID | |
| (Genus) | | NO: 2065 | PATENT201612012 | (Genus) | | NO: 55 | |
| Lachnospiraceae | Ascusb_817 | SEQ ID | PATENT201612001, | Orpinomyces | Ascusf_786 | SEQ ID | |
| incertae sedis | | NO: 2066 | PATENT201612006, | (Genus) | | NO: 56 | |
| (Family) | | | PATENT201612009, | | | | |
| | | | PATENT201612012, | | | | |
| | | | PATENT201612013, | | | | |
| | | | NRRL B-67349 | | | | |
| Butyrivibrio | Ascusb_826 | SEQ ID | PATENT201612011, | Piromyces | Ascusf_836 | SEQ ID | |
| (Genus) | | NO: 2067 | PATENT201612012, | (Genus) | | NO: 57 | |
| | | | PATENT201612013, | | | | |
| | | | NRRL B-67347 | | | | |
| Pseudobutyrivibrio | Ascusb_880 | SEQ ID | PATENT201612008, | Phyllosticta | Ascusf_923 | SEQ ID | |
| (Genus) | | NO: 2068 | PATENT201612009 | capitalensis | | NO: 58 | |
| | | | | (Genus + Species) | | | |
| Turicibacter | Ascusb_913 | SEQ ID | PATENT201612007, | Orpinomyces | Ascusf_1020 | SEQ ID | |
| (Genus) | | NO: 2069 | PATENT201612008, | (Genus) | | NO: 59 | |
| | | | PATENT201612009, | | | | |
| | | | PATENT201612010, | | | | |
| | | | PATENT201612011, | | | | |
| | | | PATENT201612012 | | | | |
| Lachnospiraceae | Ascusb_974 | SEQ ID | PATENT201612013 | Orpinomyces | Ascusf_1103 | SEQ ID | |
| incertae sedis | | NO: 2070 | | (Genus) | | NO: 60 | |
| (Family) | | | | | | | |
| Pseudobutyrivibrio | Ascusb_1069 | SEQ ID | PATENT201612011, | Orpinomyces | Ascusf_81 | SEQ ID | |
| (Genus) | | NO: 2071 | PATENT201612012, | (Genus) | | NO: 2104 | |
| | | | NRRL B-67348 | | | | |
| Anaerolinea | Ascusb_1074 | SEQ ID | PATENT201612005, | Piromyces | Ascusf_206 | SEQ ID | PATENT201612003 |
| (Genus) | | NO: 2072 | PATENT201612007, | (Genus) | | NO: 2105 | |
| | | | PATENT201612008, | | | | |
| | | | PATENT201612012 | | | | |
| Roseburia | Ascusb_1293 | SEQ ID | | Piromyces | Ascusf_208 | SEQ ID | PATENT201612003 |
| (Genus) | | NO: 2073 | | (Genus) | | NO: 2106 | |
| Propionibacterium | Ascusb_1367 | SEQ ID | PATENT201612007, | Piromyces | Ascusf_1012 | SEQ ID | PATENT201612003 |
| (Genus) | | NO: 2074 | PATENT201612009, | (Genus) | | NO: 2107 | |
| | | | PATENT201612012 | | | | |
| Clostridium_XIVa | Ascusb_1632 | SEQ ID | PATENT201612011, | | | | |
| (Cluster) | | NO: 2075 | PATENT201612012 | | | | |
| Olsenella | Ascusb_1674 | SEQ ID | PATENT201612001, | | | | |
| (Genus) | | NO: 2076 | PATENT201612009 | | | | |

¹Deposit number applicable to Budapest treaty and/or type stain rules and procedures
²Deposit number applicable to Budapest treaty and/or type stain rules and procedures
³Deposit number applicable to Budapest treaty and/or type stain rules and procedures
⁴Deposit number applicable to Budapest treaty and/or type stain rules and procedures

TABLE 3
Microbes of the present disclosure

| Predicted Closest | | |
|---|---|---|
| Taxa of Isolated | Strain | Sequence |
| Microbes | Designation | Identifier |
| Corynebacterium | Ascusb_3 | 61 |
| Prevotella | Ascusb_50 | 62 |
| Comamonas | Ascusb_90 | 63 |
| Clostridium_XlVa | Ascusb_117 | 64 |
| Hippea | Ascusb_171 | 65 |
| Anaerovorax | Ascusb_177 | 66 |
| Clostridium_XlVa | Ascusb_179 | 67 |
| Rummeliibacillus | Ascusb_224 | 68 |
| Clostridium_XlVa | Ascusb_234 | 69 |
| Lachnospiracea_incertae_sedis | Ascusb_274 | 70 |
| Prevotella | Ascusb_276 | 71 |
| Anaerovorax | Ascusb_293 | 72 |
| Pseudoflavonifractor | Ascusb_327 | 73 |
| Prevotella | Ascusb_337 | 74 |
| Clostridium_XlVa | Ascusb_357 | 75 |
| Clostridium_XlVa | Ascusb_357 | 76 |
| Coprococcus | Ascusb_361 | 77 |
| Pyramidobacter | Ascusb_388 | 78 |
| Syntrophococcus | Ascusb_425 | 79 |
| Prevotella | Ascusb_444 | 80 |
| Clostridium_XlVa | Ascusb_456 | 81 |
| Prevotella | Ascusb_492 | 82 |
| Roseburia | Ascusb_523 | 83 |
| Clostridium_XlVa | Ascusb_526 | 84 |
| Lachnospiracea_incertae_sedis | Ascusb_570 | 85 |
| Clostridium_XlVa | Ascusb_584 | 86 |
| Acidothermus | Ascusb_605 | 87 |
| Adlercreutzia | Ascusb_606 | 88 |
| Prevotella | Ascusb_617 | 89 |
| Lachnospiracea_incertae_sedis | Ascusb_635 | 90 |
| Proteiniclasticum | Ascusb_642 | 91 |
| Lachnospiracea_incertae_sedis | Ascusb_647 | 92 |
| Anaerovorax | Ascusb_656 | 93 |
| Prevotella | Ascusb_669 | 94 |
| Bacteroides | Ascusb_681 | 95 |
| Clostridium_III | Ascusb_704 | 96 |
| Prevotella | Ascusb_706 | 97 |
| Acinetobacter | Ascusb_717 | 98 |
| Erysipelothrix | Ascusb_752 | 99 |
| Bacteroides | Ascusb_790 | 100 |
| Clostridium_XlVa | Ascusb_797 | 101 |
| Butyrivibrio | Ascusb_802 | 102 |
| Eubacterium | Ascusb_805 | 103 |
| Prevotella | Ascusb_828 | 104 |
| Eubacterium | Ascusb_890 | 105 |
| Prevotella | Ascusb_909 | 106 |
| Lachnospiracea_incertae_sedis | Ascusb_924 | 107 |
| Coprococcus | Ascusb_955 | 108 |
| Prevotella | Ascusb_958 | 109 |
| Clostridium_XlVa | Ascusb_980 | 110 |
| Prevotella | Ascusb_982 | 111 |
| Catonella | Ascusb_990 | 112 |
| Methanobrevibacter | Ascusb_993 | 113 |
| Ruminococcus | Ascusb_1013 | 114 |
| Lachnospiracea_incertae_sedis | Ascusb_1021 | 115 |
| Coprococcus | Ascusb_1033 | 116 |
| Clostridium_XlVa | Ascusb_1090 | 117 |
| Lachnospiracea_incertae_sedis | Ascusb_1108 | 118 |
| Prevotella | Ascusb_1113 | 119 |
| Anaerovorax | Ascusb_1114 | 120 |
| Asteroleplasma | Ascusb_1116 | 121 |
| Clostridium_XlVa | Ascusb_1118 | 122 |
| Caulobacter | Ascusb_1123 | 123 |
| Lachnospiracea_incertae_sedis | Ascusb_1128 | 124 |
| Roseburia | Ascusb_1152 | 125 |
| Clostridium_XlVa | Ascusb_1166 | 126 |
| Acinetobacter | Ascusb_1170 | 127 |
| Bacteroides | Ascusb_1176 | 128 |
| Erysipelothrix | Ascusb_1182 | 129 |
| Coprococcus | Ascusb_1199 | 130 |
| Clostridium_XlVa | Ascusb_1201 | 131 |
| Bacteroides | Ascusb_1218 | 132 |
| Coprococcus | Ascusb_1239 | 133 |
| Anaerovorax | Ascusb_1269 | 134 |
| Pseudoflavonifractor | Ascusb_1296 | 135 |
| Pseudoflavonifractor | Ascusb_1296 | 136 |
| Prevotella | Ascusb_1298 | 137 |
| Lachnospiracea_incertae_sedis | Ascusb_1304 | 138 |
| Roseburia | Ascusb_1320 | 139 |
| Prevotella | Ascusb_1330 | 140 |
| Coprococcus | Ascusb_955 | 108 |
| Prevotella | Ascusb_958 | 109 |
| Clostridium_XlVa | Ascusb_980 | 110 |
| Prevotella | Ascusb_982 | 111 |
| Catonella | Ascusb_990 | 112 |
| Methanobrevibacter | Ascusb_993 | 113 |
| Ruminococcus | Ascusb_1013 | 114 |
| Lachnospiracea_incertae_sedis | Ascusb_1021 | 115 |
| Coprococcus | Ascusb_1033 | 116 |
| Clostridium_XlVa | Ascusb_1090 | 117 |
| Lachnospiracea_incertae_sedis | Ascusb_1108 | 118 |
| Prevotella | Ascusb_1113 | 119 |
| Anaerovorax | Ascusb_1114 | 120 |
| Asteroleplasma | Ascusb_1116 | 121 |
| Clostridium_XlVa | Ascusb_1118 | 122 |
| Caulobacter | Ascusb_1123 | 123 |
| Lachnospiracea_incertae_sedis | Ascusb_1128 | 124 |
| Roseburia | Ascusb_1152 | 125 |
| Clostridium_XlVa | Ascusb_1166 | 126 |
| Acinetobacter | Ascusb_1170 | 127 |
| Bacteroides | Ascusb_1176 | 128 |
| Erysipelothrix | Ascusb_1182 | 129 |
| Coprococcus | Ascusb_1199 | 130 |
| Clostridium_XlVa | Ascusb_1201 | 131 |
| Bacteroides | Ascusb_1218 | 132 |
| Coprococcus | Ascusb_1239 | 133 |
| Anaerovorax | Ascusb_1269 | 134 |
| Pseudoflavonifractor | Ascusb_1296 | 135 |
| Pseudoflavonifractor | Ascusb_1296 | 136 |
| Prevotella | Ascusb_1298 | 137 |
| Lachnospiracea_incertae_sedis | Ascusb_1304 | 138 |
| Roseburia | Ascusb_1320 | 139 |
| Prevotella | Ascusb_1330 | 140 |
| Ruminococcus | Ascusb_1336 | 141 |
| Atopobium | Ascusb_1341 | 142 |
| Eubacterium | Ascusb_1347 | 143 |
| Robinsoniella | Ascusb_1355 | 144 |
| Neisseria | Ascusb_1357 | 145 |
| Ruminococcus | Ascusb_1362 | 146 |
| Prevotella | Ascusb_1364 | 147 |
| Slackia | Ascusb_1389 | 148 |
| Prevotella | Ascusb_1400 | 149 |
| Clostridium_XlVa | Ascusb_1410 | 150 |
| Bacteroides | Ascusb_1417 | 151 |
| Anaerorhabdus | Ascusb_1426 | 152 |
| Bacteroides | Ascusb_1433 | 153 |
| Prevotella | Ascusb_1439 | 154 |
| Corynebacterium | Ascusb_1440 | 155 |
| Atopobium | Ascusb_1468 | 156 |
| Streptophyta | Ascusb_1473 | 157 |
| Prevotella | Ascusb_1485 | 158 |
| Roseburia | Ascusb_1490 | 159 |
| Prevotella | Ascusb_1492 | 160 |
| Prevotella | Ascusb_1528 | 161 |
| Eubacterium | Ascusb_1538 | 162 |
| Rhodocista | Ascusb_1543 | 163 |
| Prevotella | Ascusb_1546 | 164 |
| Clostridium_XlVa | Ascusb_1553 | 165 |
| Prevotella | Ascusb_1554 | 166 |
| Prevotella | Ascusb_1571 | 167 |
| Streptophyta | Ascusb_1578 | 168 |
| Ochrobactrum | Ascusb_1580 | 169 |
| Mogibacterium | Ascusb_1591 | 170 |
| Adlercreutzia | Ascusb_1600 | 171 |
| Prevotella | Ascusb_1609 | 172 |
| Riemerella | Ascusb_1627 | 173 |
| Prevotella | Ascusb_1640 | 174 |
| Roseburia | Ascusb_1645 | 175 |
| Slackia | Ascusb_1647 | 176 |
| Clostridium_IV | Ascusb_1656 | 177 |
| Syntrophococcus | Ascusb_1659 | 178 |
| Prevotella | Ascusb_1667 | 179 |
| Treponema | Ascusb_1689 | 180 |
| Prevotella | Ascusb_1708 | 181 |
| Anaerovorax | Ascusb_1723 | 182 |
| Prevotella | Ascusb_1727 | 183 |
| Methanobrevibacter | Ascusb_1739 | 184 |
| Corynebacterium | Ascusb_1773 | 185 |
| Clostridium_XlVa | Ascusb_1793 | 186 |
| Alkaliphilus | Ascusb_1795 | 187 |
| Ruminococcus | Ascusb_1797 | 188 |
| Clostridium_XlVa | Ascusb_1806 | 189 |
| Eubacterium | Ascusb_1819 | 190 |
| Bacteroides | Ascusb_1835 | 191 |
| Roseburia | Ascusb_1886 | 192 |
| Lentisphaera | Ascusb_1901 | 193 |
| Eubacterium | Ascusb_1905 | 194 |
| Roseburia | Ascusb_1918 | 195 |
| Clostridium_IV | Ascusb_1922 | 196 |
| Hahella | Ascusb_1947 | 197 |
| Butyricicoccus | Ascusb_1969 | 198 |
| Clostridium_IV | Ascusb_2016 | 199 |
| Prevotella | Ascusb_2024 | 200 |
| Clostridium_IV | Ascusb_2058 | 201 |
| Desulfovibrio | Ascusb_2081 | 202 |
| Sphingobacterium | Ascusb_2101 | 203 |
| Roseburia | Ascusb_2105 | 204 |
| Bacteroides | Ascusb_2131 | 205 |
| Ruminococcus | Ascusb_2141 | 206 |
| Prevotella | Ascusb_2156 | 207 |
| Asteroleplasma | Ascusb_2168 | 208 |
| Syntrophococcus | Ascusb_2182 | 209 |
| Victivallis | Ascusb_2199 | 210 |
| Lachnobacterium | Ascusb_2210 | 211 |
| Lachnospiracea_incertae_sedis | Ascusb_2211 | 212 |
| Clostridium_IV | Ascusb_2218 | 213 |
| Anaerorhabdus | Ascusb_2221 | 214 |
| Altererythrobacter | Ascusb_2236 | 215 |
| Clostridium_XlVa | Ascusb_2246 | 216 |
| Clostridium_XlVa | Ascusb_2263 | 217 |
| Proteiniclasticum | Ascusb_2264 | 218 |
| Bifidobacterium | Ascusb_2308 | 219 |
| Clostridium_XlVa | Ascusb_2322 | 220 |
| Clostridium_XlVa | Ascusb_2323 | 221 |
| Desulfovibrio | Ascusb_2332 | 222 |
| Clostridium_XlVa | Ascusb_2353 | 223 |
| Nitrobacter | Ascusb_2375 | 224 |
| Enterorhabdus | Ascusb_2414 | 225 |
| Clostridium_{—}sensu_{—}stricto | Ascusb_2429 | 226 |
| Oscillibacter | Ascusb_2435 | 227 |
| Nautilia | Ascusb_2437 | 228 |
| Corynebacterium | Ascusb_2447 | 229 |
| Ruminococcus | Ascusb_2452 | 230 |
| Coprococcus | Ascusb_2461 | 231 |
| Eubacterium | Ascusb_2462 | 232 |
| Rikenella | Ascusb_2470 | 233 |
| Clostridium_XlVa | Ascusb_2482 | 234 |
| Paenibacillus | Ascusb_2487 | 235 |
| Ruminococcus | Ascusb_2492 | 236 |
| Prevotella | Ascusb_2503 | 237 |
| Haematobacter | Ascusb_2504 | 238 |
| Prevotella | Ascusb_2523 | 239 |
| Clostridium_XlVa | Ascusb_2537 | 240 |
| Lachnospiracea_incertae_sedis | Ascusb_2538 | 241 |
| Enterorhabdus | Ascusb_2565 | 242 |
| Blautia | Ascusb_2591 | 243 |
| Sporobacter | Ascusb_2592 | 244 |
| Oscillibacter | Ascusb_2607 | 245 |
| Clostridium_XlVa | Ascusb_2608 | 246 |
| Atopobium | Ascusb_2613 | 247 |
| Sporobacter | Ascusb_2626 | 248 |
| Clostridium_XlVa | Ascusb_2629 | 249 |
| Candidate Phylum OD1 | Ascusb_2643 | 250 |
| Oscillibacter | Ascusb_2645 | 251 |
| Clostridium_XlVa | Ascusb_2647 | 252 |
| Clostridium_IV | Ascusb_2649 | 253 |
| Mogibacterium | Ascusb_2653 | 254 |
| Roseburia | Ascusb_2663 | 255 |
| Lachnospiracea_incertae_sedis | Ascusb_2671 | 256 |
| Pelotomaculum | Ascusb_2696 | 257 |
| Pelotomaculum | Ascusb_2712 | 258 |
| Clostridium_XlVa | Ascusb_2713 | 259 |
| Robinsoniella | Ascusb_2730 | 260 |
| Coprococcus | Ascusb_2746 | 261 |
| Wautersiella | Ascusb_2757 | 262 |
| Lachnospiracea_incertae_sedis | Ascusb_2762 | 263 |
| Planctomyces | Ascusb_2764 | 264 |
| Treponema | Ascusb_2800 | 265 |
| Coprococcus | Ascusb_2806 | 266 |
| Paracoccus | Ascusb_2809 | 267 |
| Ruminococcus | Ascusb_2811 | 268 |
| Atopobium | Ascusb_2814 | 269 |
| Prevotella | Ascusb_2825 | 270 |
| Clostridium_IV | Ascusb_2832 | 271 |
| Clostridium_XlVa | Ascusb_2838 | 272 |
| Clostridium_XlVa | Ascusb_2843 | 273 |
| Clostridium_XlVa | Ascusb_2853 | 274 |
| Prevotella | Ascusb_2857 | 275 |
| Dethiosulfovibrio | Ascusb_2872 | 276 |
| Clostridium_XI | Ascusb_2885 | 277 |
| Clostridium_IV | Ascusb_2907 | 278 |
| Saccharofermentans | Ascusb_2909 | 279 |
| Clostridium_{—}sensu_{—}stricto | Ascusb_2912 | 280 |
| Roseburia | Ascusb_2914 | 281 |
| Lachnospiracea_incertae_sedis | Ascusb_2930 | 282 |
| Candidate phylum SR1 | Ascusb_2946 | 283 |
| Hydrogenoanaerobacterium | Ascusb_2948 | 284 |
| Victivallis | Ascusb_2966 | 285 |
| Clostridium_IV | Ascusb_2983 | 286 |
| Pelotomaculum | Ascusb_2988 | 287 |
| Clostridium_XlVa | Ascusb_2990 | 288 |
| Saccharofermentans | Ascusb_3005 | 289 |
| Lachnospiracea_incertae_sedis | Ascusb_3008 | 290 |
| Coprococcus | Ascusb_3010 | 291 |
| Clostridium_XlVa | Ascusb_3022 | 292 |
| Clostridium_XlVb | Ascusb_3029 | 293 |
| Papillibacter | Ascusb_3053 | 294 |
| Bartonella | Ascusb_3056 | 295 |
| Clostridium_IV | Ascusb_3058 | 296 |
| Eubacterium | Ascusb_3061 | 297 |
| Asaccharobacter | Ascusb_3066 | 298 |
| Clostridium_IV | Ascusb_3073 | 299 |
| Blautia | Ascusb_3074 | 300 |
| Prevotella | Ascusb_3079 | 301 |
| Ruminococcus | Ascusb_3087 | 302 |
| Selenomonas | Ascusb_3120 | 303 |
| Treponema | Ascusb_3142 | 304 |
| Adlercreutzia | Ascusb_3147 | 305 |
| Butyricicoccus | Ascusb_3161 | 306 |
| Pseudoflavonifractor | Ascusb_3163 | 307 |
| Corynebacterium | Ascusb_3165 | 308 |
| Adlercreutzia | Ascusb_3188 | 309 |
| Selenomonas | Ascusb_3197 | 310 |
| Coraliomargarita | Ascusb_3213 | 311 |
| Paraprevotella | Ascusb_3225 | 312 |
| Oscillibacter | Ascusb_3229 | 313 |
| Anaerovorax | Ascusb_3240 | 314 |
| Clostridium_XlVa | Ascusb_3242 | 315 |
| Saccharofermentans | Ascusb_3248 | 316 |
| Erysipelothrix | Ascusb_3263 | 317 |
| Agaricicola | Ascusb_3275 | 318 |
| Denitrobacterium | Ascusb_3285 | 319 |
| Armatimonadetes | Ascusb_3299 | 320 |
| Asaccharobacter | Ascusb_3304 | 321 |
| Anaeroplasma | Ascusb_3322 | 322 |
| Prevotella | Ascusb_3333 | 323 |
| Lachnospiracea_incertae_sedis | Ascusb_3339 | 324 |
| Clostridium_IV | Ascusb_3351 | 325 |
| Streptococcus | Ascusb_3376 | 326 |
| Cellulosilyticum | Ascusb_3393 | 327 |
| Asaccharobacter | Ascusb_3405 | 328 |
| Enterorhabdus | Ascusb_3408 | 329 |
| Treponema | Ascusb_3415 | 330 |
| Roseburia | Ascusb_3417 | 331 |
| Victivallis | Ascusb_3422 | 332 |
| Prevotella | Ascusb_3424 | 333 |
| Roseburia | Ascusb_3446 | 334 |
| Ruminococcus | Ascusb_3451 | 335 |
| Mogibacterium | Ascusb_3456 | 336 |
| Lachnospiracea_incertae_sedis | Ascusb_3467 | 337 |
| Prevotella | Ascusb_3479 | 338 |
| Clostridium_{—}sensu_{—}stricto | Ascusb_3480 | 339 |
| Victivallis | Ascusb_3481 | 340 |
| Cyanobacteria | Ascusb_3482 | 341 |
| Treponema | Ascusb_3483 | 342 |
| Stenotrophomonas | Ascusb_3484 | 343 |
| | Ascusb_3492 | 344 |
| Clostridium_XlVa | Ascusb_3494 | 345 |
| Sphingobium | Ascusb_3495 | 346 |
| Lachnospiracea_incertae_sedis | Ascusb_3512 | 347 |
| Oscillibacter | Ascusb_3518 | 348 |
| Methylobacterium | Ascusb_3523 | 349 |
| Zhangella | Ascusb_3530 | 350 |
| Lachnospiracea_incertae_sedis | Ascusb_3545 | 351 |
| Oscillibacter | Ascusb_3546 | 352 |
| Clostridium_III | Ascusb_3548 | 353 |
| Coraliomargarita | Ascusb_3563 | 354 |
| Eubacterium | Ascusb_3575 | 355 |
| Enterorhabdus | Ascusb_3578 | 356 |
| Clostridium_XlVa | Ascusb_3587 | 357 |
| Saccharofermentans | Ascusb_3592 | 358 |
| Clostridium_IV | Ascusb_3600 | 359 |
| Clostridium_{—}sensu_{—}stricto | Ascusb_3602 | 360 |
| Victivallis | Ascusb_3638 | 361 |
| Coprococcus | Ascusb_3642 | 362 |
| Pseudoflavonifractor | Ascusb_3647 | 363 |
| Anaeroplasma | Ascusb_3674 | 364 |
| Anaeroplasma | Ascusb_3687 | 365 |
| Bacteroides | Ascusb_3700 | 366 |
| Acinetobacter | Ascusb_3717 | 367 |
| Victivallis | Ascusb_3724 | 368 |
| Victivallis | Ascusb_3725 | 369 |
| Mogibacterium | Ascusb_3728 | 370 |
| Oscillibacter | Ascusb_3746 | 371 |
| Butyricimonas | Ascusb_3748 | 372 |
| Dethiosulfovibrio | Ascusb_3750 | 373 |
| Pseudoflavonifractor | Ascusb_3751 | 374 |
| Clostridium_IV | Ascusb_3762 | 375 |
| Anaeroplasma | Ascusb_3763 | 376 |
| Oscillibacter | Ascusb_3768 | 377 |
| Herbiconiux | Ascusb_3775 | 378 |
| Eubacterium | Ascusb_3779 | 379 |
| Armatimonadetes | Ascusb_3789 | 380 |
| Selenomonas | Ascusb_3796 | 381 |
| Clostridium_IV | Ascusb_3811 | 382 |
| Mogibacterium | Ascusb_3825 | 383 |
| Clostridium_IV | Ascusb_3838 | 384 |
| Roseburia | Ascusb_3849 | 385 |
| Anaerovibrio | Ascusb_3866 | 386 |
| Clostridium_III | Ascusb_3875 | 387 |
| Saccharofermentans | Ascusb_3903 | 388 |
| Saccharofermentans | Ascusb_3911 | 389 |
| Prevotella | Ascusb_3914 | 390 |
| Clostridium_XlVa | Ascusb_3919 | 391 |
| Robinsoniella | Ascusb_3950 | 392 |
| Brevundimonas | Ascusb_3952 | 393 |
| Anaerotruncus | Ascusb_3970 | 394 |
| Victivallis | Ascusb_3982 | 395 |
| Bacteroides | Ascusb_4008 | 396 |
| Clostridium_XlVb | Ascusb_4019 | 397 |
| Prevotella | Ascusb_4033 | 398 |
| Ruminococcus | Ascusb_4034 | 399 |
| Pelobacter | Ascusb_4040 | 400 |
| Clostridium_XlVa | Ascusb_4063 | 401 |
| Clostridium_XlVa | Ascusb_4067 | 402 |
| Clostridium_XlVb | Ascusb_4083 | 403 |
| Coprococcus | Ascusb_4085 | 404 |
| Clostridium_IV | Ascusb_4086 | 405 |
| Clostridium_IV | Ascusb_4095 | 406 |
| Coprococcus | Ascusb_4114 | 407 |
| Victivallis | Ascusb_4115 | 408 |
| Clostridium_III | Ascusb_4118 | 409 |
| Anaerovibrio | Ascusb_4120 | 410 |
| Anaerovorax | Ascusb_4124 | 411 |
| Proteiniclasticum | Ascusb_4142 | 412 |
| Anaerovorax | Ascusb_4143 | 413 |
| Selenomonas | Ascusb_4149 | 414 |
| Hydrogenoanaerobacterium | Ascusb_4155 | 415 |
| Acetanaerobacterium | Ascusb_4156 | 416 |
| Clostridium_XlVa | Ascusb_4159 | 417 |
| Asaccharobacter | Ascusb_4161 | 418 |
| Clostridium_XlVa | Ascusb_4167 | 419 |
| Lachnospiracea_incertae_sedis | Ascusb_4171 | 420 |
| Saccharofermentans | Ascusb_4172 | 421 |
| Prevotella | Ascusb_4176 | 422 |
| Anaeroplasma | Ascusb_4179 | 423 |
| Spirochaeta | Ascusb_4188 | 424 |
| Alkaliphilus | Ascusb_4213 | 425 |
| Paraprevotella | Ascusb_4215 | 426 |
| Hippea | Ascusb_4217 | 427 |
| Prevotella | Ascusb_4223 | 428 |
| Prevotella | Ascusb_4237 | 429 |
| Hydrogenoanaerobacterium | Ascusb_4241 | 430 |
| Clostridium_{—}sensu_{—}stricto | Ascusb_4265 | 431 |
| Paraeggerthella | Ascusb_4266 | 432 |
| Clostridium_XlVa | Ascusb_4277 | 433 |
| Clostridium_XlVa | Ascusb_4279 | 434 |
| Clostridium_IV | Ascusb_4281 | 435 |
| Clostridium_XlVa | Ascusb_4292 | 436 |
| Adhaeribacter | Ascusb_4313 | 437 |
| Syntrophococcus | Ascusb_4316 | 438 |
| Clostridium_{—}sensu_{—}stricto | Ascusb_4317 | 439 |
| Saccharofermentans | Ascusb_4326 | 440 |
| Clostridium_IV | Ascusb_4332 | 441 |
| Clostridium_IV | Ascusb_4345 | 442 |
| Clostridium_{—}sensu_{—}stricto | Ascusb_4347 | 443 |
| Coraliomargarita | Ascusb_4375 | 444 |
| Sharpea | Ascusb_4380 | 445 |
| Clostridium_IV | Ascusb_4394 | 446 |
| Anaerovorax | Ascusb_4416 | 447 |
| Blautia | Ascusb_4421 | 448 |
| Clostridium_XlVa | Ascusb_4422 | 449 |
| Clostridium_IV | Ascusb_4432 | 450 |
| Anaerovorax | Ascusb_4433 | 451 |
| Coraliomargarita | Ascusb_4434 | 452 |
| Lachnospiracea_incertae_sedis | Ascusb_4442 | 453 |
| Aquiflexum | Ascusb_4449 | 454 |
| Pedobacter | Ascusb_4450 | 455 |
| Robinsoniella | Ascusb_4457 | 456 |
| Pelomonas | Ascusb_4468 | 457 |
| Saccharofermentans | Ascusb_4469 | 458 |
| Paracoccus | Ascusb_4479 | 459 |
| Enterorhabdus | Ascusb_4486 | 460 |
| Beijerinckia | Ascusb_4496 | 461 |
| Sporobacter | Ascusb_4505 | 462 |
| Clostridium_IV | Ascusb_4517 | 463 |
| Bacillus | Ascusb_4522 | 464 |
| Saccharofermentans | Ascusb_4537 | 465 |
| Spirochaeta | Ascusb_4545 | 466 |
| Prevotella | Ascusb_4548 | 467 |
| Eubacterium | Ascusb_4556 | 468 |
| Herbiconiux | Ascusb_4559 | 469 |
| Brevundimonas | Ascusb_4560 | 470 |
| Mogibacterium | Ascusb_4563 | 471 |
| Anaerorhabdus | Ascusb_4566 | 472 |
| Victivallis | Ascusb_4569 | 473 |
| Prevotella | Ascusb_4573 | 474 |
| Anaerovorax | Ascusb_4579 | 475 |
| Aquiflexum | Ascusb_4606 | 476 |
| Oscillibacter | Ascusb_4618 | 477 |
| Altererythrobacter | Ascusb_4626 | 478 |
| Hydrogenoanaerobacterium | Ascusb_4627 | 479 |
| Clostridium_III | Ascusb_4634 | 480 |
| Clostridium_XlVb | Ascusb_4639 | 481 |
| Saccharofermentans | Ascusb_4644 | 482 |
| Roseburia | Ascusb_4652 | 483 |
| Anaeroplasma | Ascusb_4657 | 484 |
| Planctomyces | Ascusb_4676 | 485 |
| Ruminococcus | Ascusb_4679 | 486 |
| Selenomonas | Ascusb_4695 | 487 |
| Anaeroplasma | Ascusb_4696 | 488 |
| Anaerovorax | Ascusb_4700 | 489 |
| Rummeliibacillus | Ascusb_4701 | 490 |
| Clostridium_XlVa | Ascusb_4716 | 491 |
| Anaeroplasma | Ascusb_4731 | 492 |
| Butyrivibrio | Ascusb_4737 | 493 |
| Lachnospiracea_incertae_sedis | Ascusb_4738 | 494 |
| Anaerotruncus | Ascusb_4758 | 495 |
| Syntrophococcus | Ascusb_4763 | 496 |
| Paraeggerthella | Ascusb_4795 | 497 |
| Papillibacter | Ascusb_4800 | 498 |
| Lachnospiracea_incertae_sedis | Ascusb_4805 | 499 |
| Prevotella | Ascusb_4820 | 500 |
| Papillibacter | Ascusb_4828 | 501 |
| Streptococcus | Ascusb_4852 | 502 |
| Methanobrevibacter | Ascusb_4859 | 503 |
| Prevotella | Ascusb_4861 | 504 |
| Prevotella | Ascusb_4867 | 505 |
| Prevotella | Ascusb_4873 | 506 |
| Coraliomargarita | Ascusb_4882 | 507 |
| Prevotella | Ascusb_4886 | 508 |
| Thermotalea | Ascusb_4893 | 509 |
| Clostridium_XlVa | Ascusb_4897 | 510 |
| Atopobium | Ascusb_4945 | 511 |
| Prevotella | Ascusb_4969 | 512 |
| Mogibacterium | Ascusb_4972 | 513 |
| Clostridium_XlVa | Ascusb_4976 | 514 |
| Clostridium_XlVa | Ascusb_4997 | 515 |
| Eggerthella | Ascusb_4999 | 516 |
| Blautia | Ascusb_5000 | 517 |
| Vampirovibrio | Ascusb_5006 | 518 |
| Papillibacter | Ascusb_5040 | 519 |
| Beijerinckia | Ascusb_5058 | 520 |
| Bacteroides | Ascusb_5060 | 521 |
| Desulfotomaculum | Ascusb_5065 | 522 |
| Acidobacteria | Ascusb_5069 | 523 |
| Clostridium_XlVa | Ascusb_5081 | 524 |
| Clostridium_XlVa | Ascusb_5089 | 525 |
| Clostridium_XlVa | Ascusb_5095 | 526 |
| Cryptanaerobacter | Ascusb_5103 | 527 |
| Prevotella | Ascusb_5113 | 528 |
| Syntrophomonas | Ascusb_5137 | 529 |
| Erysipelothrix | Ascusb_5144 | 530 |
| Selenomonas | Ascusb_5165 | 531 |
| Clostridium_III | Ascusb_5171 | 532 |
| Flavobacterium | Ascusb_5181 | 533 |
| Thermotalea | Ascusb_5191 | 534 |
| Lachnospiracea_incertae_sedis | Ascusb_5194 | 535 |
| Mucilaginibacter | Ascusb_5197 | 536 |
| Bacteroides | Ascusb_5198 | 537 |
| Ruminococcus | Ascusb_5206 | 538 |
| Clostridium_XlVa | Ascusb_5223 | 539 |
| Asaccharobacter | Ascusb_5225 | 540 |
| Blautia | Ascusb_5235 | 541 |
| Mucilaginibacter | Ascusb_5247 | 542 |
| Coprococcus | Ascusb_5252 | 543 |
| Lachnospiracea_incertae_sedis | Ascusb_5253 | 544 |
| Butyricimonas | Ascusb_5255 | 545 |
| Lachnospiracea_incertae_sedis | Ascusb_5267 | 546 |
| Treponema | Ascusb_5280 | 547 |
| Clostridium_{—}sensu_{—}stricto | Ascusb_5281 | 548 |
| Clostridium_XlVa | Ascusb_5289 | 549 |
| Anaerovorax | Ascusb_5292 | 550 |
| Saccharofermentans | Ascusb_5294 | 551 |
| Clostridium_XlVa | Ascusb_5295 | 552 |
| Clostridium_III | Ascusb_5301 | 553 |
| Clostridium_IV | Ascusb_5313 | 554 |
| Ruminococcus | Ascusb_5324 | 555 |
| Clostridium_XlVa | Ascusb_5326 | 556 |
| Clostridium_XI | Ascusb_5335 | 557 |
| Clostridium_XlVa | Ascusb_5336 | 558 |
| Eubacterium | Ascusb_5338 | 559 |
| Lachnospiracea_incertae_sedis | Ascusb_5342 | 560 |
| Clostridium_IV | Ascusb_5352 | 561 |
| Ruminococcus | Ascusb_5353 | 562 |
| Clostridium_IV | Ascusb_5354 | 563 |
| Faecalibacterium | Ascusb_5360 | 564 |
| Anaerovibrio | Ascusb_5368 | 565 |
| Asaccharobacter | Ascusb_5397 | 566 |
| Pelotomaculum | Ascusb_5411 | 567 |
| Spirochaeta | Ascusb_5422 | 568 |
| Prevotella | Ascusb_5429 | 569 |
| Lachnospiracea_incertae_sedis | Ascusb_5440 | 570 |
| Anaerovorax | Ascusb_5441 | 571 |
| Clostridium_IV | Ascusb_5443 | 572 |
| Victivallis | Ascusb_5451 | 573 |
| Syntrophococcus | Ascusb_5456 | 574 |
| Syntrophococcus | Ascusb_5463 | 575 |
| Desulfovibrio | Ascusb_5481 | 576 |
| Lachnospiracea_incertae_sedis | Ascusb_5485 | 577 |
| Lachnospiracea_incertae_sedis | Ascusb_5495 | 578 |
| Clostridium_IV | Ascusb_5509 | 579 |
| Prevotella | Ascusb_5510 | 580 |
| Victivallis | Ascusb_5512 | 581 |
| Clostridium_XlVa | Ascusb_5515 | 582 |
| Selenomonas | Ascusb_5517 | 583 |
| Bacteroides | Ascusb_5530 | 584 |
| Clostridium_XlVa | Ascusb_5536 | 585 |
| Eggerthella | Ascusb_5554 | 586 |
| Selenomonas | Ascusb_5584 | 587 |
| Mogibacterium | Ascusb_5592 | 588 |
| Armatimonadetes | Ascusb_5609 | 589 |
| Clostridium_XlVa | Ascusb_5612 | 590 |
| Victivallis | Ascusb_5623 | 591 |
| Paraprevotella | Ascusb_5628 | 592 |
| Brevundimonas | Ascusb_5647 | 593 |
| Prevotella | Ascusb_5650 | 594 |
| Prevotella | Ascusb_5652 | 595 |
| Robinsoniella | Ascusb_5660 | 596 |
| Clostridium_III | Ascusb_5686 | 597 |
| Butyricimonas | Ascusb_5689 | 598 |
| Spirochaeta | Ascusb_5691 | 599 |
| Hydrogenoanaerobacterium | Ascusb_5694 | 600 |
| Proteiniclasticum | Ascusb_5716 | 601 |
| Roseburia | Ascusb_5725 | 602 |
| Clostridium_XlVa | Ascusb_5738 | 603 |
| Anaerofustis | Ascusb_5746 | 604 |
| Succiniclasticum | Ascusb_5765 | 605 |
| Anaeroplasma | Ascusb_5770 | 606 |
| Oscillibacter | Ascusb_5777 | 607 |
| Escherichia/Shigella | Ascusb_5789 | 608 |
| Bacteroides | Ascusb_5812 | 609 |
| Clostridium_XlVa | Ascusb_5830 | 610 |
| Clostridium_XlVa | Ascusb_5838 | 611 |
| Clostridium_IV | Ascusb_5841 | 612 |
| Clostridium_III | Ascusb_5845 | 613 |
| Prevotella | Ascusb_5847 | 614 |
| Coprococcus | Ascusb_5849 | 615 |
| Oscillibacter | Ascusb_5858 | 616 |
| Parabacteroides | Ascusb_5862 | 617 |
| Bacteroides | Ascusb_5868 | 618 |
| Mogibacterium | Ascusb_5869 | 619 |
| Solobacterium | Ascusb_5870 | 620 |
| Bacteroides | Ascusb_5874 | 621 |
| Clostridium_III | Ascusb_5877 | 622 |
| Victivallis | Ascusb_5879 | 623 |
| Saccharofermentans | Ascusb_5884 | 624 |
| Saccharofermentans | Ascusb_5889 | 625 |
| Olivibacter | Ascusb_5894 | 626 |
| Thermotalea | Ascusb_5895 | 627 |
| Proteiniclasticum | Ascusb_5913 | 628 |
| Clostridium_III | Ascusb_5926 | 629 |
| Anaeroplasma | Ascusb_5934 | 630 |
| Treponema | Ascusb_5939 | 631 |
| Clostridium_XlVa | Ascusb_5940 | 632 |
| Clostridium_III | Ascusb_5950 | 633 |
| Desulfotomaculum | Ascusb_5953 | 634 |
| Bacillus | Ascusb_5969 | 635 |
| Anaerovorax | Ascusb_5972 | 636 |
| Ruminococcus | Ascusb_5973 | 637 |
| Agarivorans | Ascusb_5975 | 638 |
| Anaerotruncus | Ascusb_5979 | 639 |
| Papillibacter | Ascusb_5984 | 640 |
| Clostridium_XlVa | Ascusb_5991 | 641 |
| Clostridium_III | Ascusb_5996 | 642 |
| Bacteroides | Ascusb_5997 | 643 |
| Clostridium_XlVa | Ascusb_5998 | 644 |
| Ruminococcus | Ascusb_6003 | 645 |
| Clostridium_XlVa | Ascusb_6005 | 646 |
| Oscillibacter | Ascusb_6006 | 647 |
| Nitrobacter | Ascusb_6022 | 648 |
| Clostridium_XlVa | Ascusb_6026 | 649 |
| Lachnospiracea_incertae_sedis | Ascusb_6035 | 650 |
| Limibacter | Ascusb_6037 | 651 |
| Desulfovibrio | Ascusb_6053 | 652 |
| Coprococcus | Ascusb_6067 | 653 |
| Anaerovorax | Ascusb_6070 | 654 |
| Spirochaeta | Ascusb_6074 | 655 |
| Cyanobacteria | Ascusb_6079 | 656 |
| Saccharofermentans | Ascusb_6081 | 657 |
| Anaeroplasma | Ascusb_6106 | 658 |
| Clostridium_III | Ascusb_6115 | 659 |
| Victivallis | Ascusb_6151 | 660 |
| Enterorhabdus | Ascusb_6168 | 661 |
| Clostridium_IV | Ascusb_6169 | 662 |
| Erysipelothrix | Ascusb_6172 | 663 |
| Clostridium_III | Ascusb_6200 | 664 |
| Clostridium_{—}sensu_{—}stricto | Ascusb_6207 | 665 |
| Gelidibacter | Ascusb_6212 | 666 |
| Roseburia | Ascusb_6219 | 667 |
| Neisseria | Ascusb_6270 | 668 |
| Prevotella | Ascusb_6273 | 669 |
| Cyanobacteria | Ascusb_6275 | 670 |
| Oscillibacter | Ascusb_6282 | 671 |
| Candidate phylum TM7 | Ascusb_6313 | 672 |
| Prevotella | Ascusb_6326 | 673 |
| Saccharofermentans | Ascusb_6330 | 674 |
| Erysipelotrichaceae_incertae_sedis | Ascusb_6337 | 675 |
| Spirochaeta | Ascusb_6342 | 676 |
| Clostridium_XlVa | Ascusb_6372 | 677 |
| Clostridium_XlVb | Ascusb_6376 | 678 |
| Clostridium_XlVa | Ascusb_6387 | 679 |
| Adlercreutzia | Ascusb_6389 | 680 |
| Clostridium_XlVa | Ascusb_6394 | 681 |
| Lachnospiracea_incertae_sedis | Ascusb_6400 | 682 |
| Clostridium_IV | Ascusb_6403 | 683 |
| Adlercreutzia | Ascusb_6406 | 684 |
| Prevotella | Ascusb_6409 | 685 |
| Syntrophococcus | Ascusb_6420 | 686 |
| Treponema | Ascusb_6433 | 687 |
| Prevotella | Ascusb_6448 | 688 |
| Clostridium_III | Ascusb_6450 | 689 |
| Pseudoflavonifractor | Ascusb_6463 | 690 |
| Clostridium_IV | Ascusb_6468 | 691 |
| Sharpea | Ascusb_6473 | 692 |
| Dongia | Ascusb_6499 | 693 |
| Eubacterium | Ascusb_6505 | 694 |
| Prevotella | Ascusb_6507 | 695 |
| Clostridium_IV | Ascusb_6519 | 696 |
| Parabacteroides | Ascusb_6525 | 697 |
| Brevundimonas | Ascusb_6535 | 698 |
| Clostridium_XlVa | Ascusb_6540 | 699 |
| Ruminococcus | Ascusb_6541 | 700 |
| Thermotalea | Ascusb_6558 | 701 |
| Victivallis | Ascusb_6561 | 702 |
| Anaeroplasma | Ascusb_6563 | 703 |
| Oscillibacter | Ascusb_6564 | 704 |
| Ruminococcus | Ascusb_6570 | 705 |
| Clostridium_XlVa | Ascusb_6578 | 706 |
| Clostridium_XlVa | Ascusb_6581 | 707 |
| Clostridium_IV | Ascusb_6586 | 708 |
| Roseburia | Ascusb_6593 | 709 |
| Eggerthella | Ascusb_6612 | 710 |
| Clostridium_III | Ascusb_6614 | 711 |
| Clostridium_XlVa | Ascusb_6621 | 712 |
| Lactobacillus | Ascusb_6630 | 713 |
| Bacteroides | Ascusb_6633 | 714 |
| Cellulosilyticum | Ascusb_6635 | 715 |
| Brevundimonas | Ascusb_6645 | 716 |
| Clostridium_IV | Ascusb_6670 | 717 |
| Prevotella | Ascusb_6672 | 718 |
| Helicobacter | Ascusb_6676 | 719 |
| Clostridium_IV | Ascusb_6683 | 720 |
| Proteiniclasticum | Ascusb_6684 | 721 |
| Brevundimonas | Ascusb_6701 | 722 |
| Clostridium_XlVa | Ascusb_6704 | 723 |
| Prevotella | Ascusb_6706 | 724 |
| Desulfovibrio | Ascusb_6708 | 725 |
| Coraliomargarita | Ascusb_6709 | 726 |
| Eubacterium | Ascusb_6715 | 727 |
| Sphingomonas | Ascusb_6718 | 728 |
| Prevotella | Ascusb_6730 | 729 |
| Clostridium_IV | Ascusb_6734 | 730 |
| Paraprevotella | Ascusb_6735 | 731 |
| Ruminococcus | Ascusb_6746 | 732 |
| Saccharofermentans | Ascusb_6756 | 733 |
| Clostridium_III | Ascusb_6757 | 734 |
| Clostridium_III | Ascusb_6774 | 735 |
| Turicibacter | Ascusb_6792 | 736 |
| Prevotella | Ascusb_6796 | 737 |
| Clostridium_XlVa | Ascusb_6803 | 738 |
| Fusibacter | Ascusb_6813 | 739 |
| Clostridium_XlVa | Ascusb_6824 | 740 |
| Clostridium_IV | Ascusb_6833 | 741 |
| Rummeliibacillus | Ascusb_6848 | 742 |
| Mogibacterium | Ascusb_6852 | 743 |
| Bacteroides | Ascusb_6864 | 744 |
| Pelospora | Ascusb_6875 | 745 |
| Eggerthella | Ascusb_6880 | 746 |
| Eubacterium | Ascusb_6887 | 747 |
| Blautia | Ascusb_6889 | 748 |
| Clostridium_XlVb | Ascusb_6901 | 749 |
| Ehrlichia | Ascusb_6907 | 750 |
| Eubacterium | Ascusb_6930 | 751 |
| Prevotella | Ascusb_6943 | 752 |
| Clostridium_XlVa | Ascusb_6952 | 753 |
| Treponema | Ascusb_6954 | 754 |
| Hydrogenoanaerobacterium | Ascusb_6957 | 755 |
| Selenomonas | Ascusb_6964 | 756 |
| Saccharofermentans | Ascusb_6966 | 757 |
| Clostridium_IV | Ascusb_6971 | 758 |
| Clostridium_{—}sensu_{—}stricto | Ascusb_6976 | 759 |
| Anaerovorax | Ascusb_6979 | 760 |
| Spirochaeta | Ascusb_6997 | 761 |
| Brevundimonas | Ascusb_7001 | 762 |
| Eubacterium | Ascusb_7017 | 763 |
| Clostridium_XlVa | Ascusb_7025 | 764 |
| Anaerovorax | Ascusb_7031 | 765 |
| Ruminococcus | Ascusb_7039 | 766 |
| Papillibacter | Ascusb_7040 | 767 |
| Clostridium_IV | Ascusb_7043 | 768 |
| Hydrogenoanaerobacterium | Ascusb_7046 | 769 |
| Asaccharobacter | Ascusb_7048 | 770 |
| Clostridium_XlVa | Ascusb_7054 | 771 |
| Rhodocista | Ascusb_7078 | 772 |
| Clostridium_XlVa | Ascusb_7087 | 773 |
| Beijerinckia | Ascusb_7091 | 774 |
| Lactobacillus | Ascusb_7101 | 775 |
| Cryptanaerobacter | Ascusb_7102 | 776 |
| Prevotella | Ascusb_7113 | 777 |
| Anaerovibrio | Ascusb_7114 | 778 |
| Anaerovorax | Ascusb_7123 | 779 |
| Lachnospiracea_incertae_sedis | Ascusb_7128 | 780 |
| Enterorhabdus | Ascusb_7131 | 781 |
| Clostridium_XlVb | Ascusb_7141 | 782 |
| Selenomonas | Ascusb_7148 | 783 |
| Eubacterium | Ascusb_7149 | 784 |
| Thermotalea | Ascusb_7151 | 785 |
| Enterorhabdus | Ascusb_7153 | 786 |
| Clostridium_III | Ascusb_7159 | 787 |
| Acetanaerobacterium | Ascusb_7164 | 788 |
| Treponema | Ascusb_7168 | 789 |
| Clostridium_XlVa | Ascusb_7176 | 790 |
| Enterorhabdus | Ascusb_7180 | 791 |
| Prevotella | Ascusb_7188 | 792 |
| Desulfovibrio | Ascusb_7199 | 793 |
| Aminobacter | Ascusb_7213 | 794 |
| Clostridium_IV | Ascusb_7224 | 795 |
| Rikenella | Ascusb_7225 | 796 |
| Gordonibacter | Ascusb_7240 | 797 |
| Papillibacter | Ascusb_7245 | 798 |
| Syntrophococcus | Ascusb_7246 | 799 |
| Clostridium_{—}sensu_{—}stricto | Ascusb_7256 | 800 |
| Hahella | Ascusb_7257 | 801 |
| Vampirovibrio | Ascusb_7264 | 802 |
| Coprococcus | Ascusb_7275 | 803 |
| Coraliomargarita | Ascusb_7299 | 804 |
| Clostridium_III | Ascusb_7300 | 805 |
| Clostridium_XlVa | Ascusb_7304 | 806 |
| Desulfotomaculum | Ascusb_7325 | 807 |
| Helicobacter | Ascusb_7373 | 808 |
| Syntrophococcus | Ascusb_7380 | 809 |
| Lachnospiracea_incertae_sedis | Ascusb_7384 | 810 |
| Clostridium_IV | Ascusb_7385 | 811 |
| Paludibacter | Ascusb_7395 | 812 |
| Lachnospiracea_incertae_sedis | Ascusb_7401 | 813 |
| Lachnospiracea_incertae_sedis | Ascusb_7412 | 814 |
| Adhaeribacter | Ascusb_7419 | 815 |
| Clostridium_IV | Ascusb_7420 | 816 |
| Cryptanaerobacter | Ascusb_7424 | 817 |
| Idiomarina | Ascusb_7435 | 818 |
| Clostridium_IV | Ascusb_7437 | 819 |
| Selenomonas | Ascusb_7440 | 820 |
| Acetanaerobacterium | Ascusb_7444 | 821 |
| Bifidobacterium | Ascusb_7446 | 822 |
| Clostridium_XlVb | Ascusb_7449 | 823 |
| Asaccharobacter | Ascusb_7450 | 824 |
| Eubacterium | Ascusb_7452 | 825 |
| Anaeroplasma | Ascusb_7455 | 826 |
| Saccharofermentans | Ascusb_7456 | 827 |
| Ruminococcus | Ascusb_7467 | 828 |
| Clostridium_III | Ascusb_7470 | 829 |
| Acholeplasma | Ascusb_7472 | 830 |
| Pedobacter | Ascusb_7476 | 831 |
| Sphingomonas | Ascusb_7487 | 832 |
| Verrucomicrobia | Ascusb_7525 | 833 |
| Anaerovorax | Ascusb_7533 | 834 |
| Spirochaeta | Ascusb_7534 | 835 |
| Paraeggerthella | Ascusb_7539 | 836 |
| Lachnospiracea_incertae_sedis | Ascusb_7542 | 837 |
| Bacteroides | Ascusb_7543 | 838 |
| Paenibacillus | Ascusb_7549 | 839 |
| Prevotella | Ascusb_7553 | 840 |
| Bacteroides | Ascusb_7555 | 841 |
| Clostridium_XlVa | Ascusb_7563 | 842 |
| Clostridium_XlVa | Ascusb_7568 | 843 |
| Roseburia | Ascusb_7572 | 844 |
| Clostridium_XlVa | Ascusb_7581 | 845 |
| Clostridium_III | Ascusb_7591 | 846 |
| Pedobacter | Ascusb_7599 | 847 |
| Robinsoniella | Ascusb_7614 | 848 |
| Anaeroplasma | Ascusb_7615 | 849 |
| Clostridium_XlVa | Ascusb_7622 | 850 |
| Hydrogenoanaerobacterium | Ascusb_7626 | 851 |
| Turicibacter | Ascusb_7638 | 852 |
| Papillibacter | Ascusb_7645 | 853 |
| Clostridium_XlVa | Ascusb_7647 | 854 |
| Saccharofermentans | Ascusb_7648 | 855 |
| Clostridium_XlVb | Ascusb_7650 | 856 |
| Sporobacter | Ascusb_7662 | 857 |
| Asaccharobacter | Ascusb_7663 | 858 |
| Bacteroides | Ascusb_7669 | 859 |
| Anaeroplasma | Ascusb_7677 | 860 |
| Sporobacter | Ascusb_7680 | 861 |
| Streptomyces | Ascusb_7690 | 862 |
| Arcobacter | Ascusb_7694 | 863 |
| Clostridium_XlVa | Ascusb_7699 | 864 |
| Barnesiella | Ascusb_7706 | 865 |
| Lactobacillus | Ascusb_7723 | 866 |
| Flavobacterium | Ascusb_7728 | 867 |
| Victivallis | Ascusb_7733 | 868 |
| Clostridium_XlVa | Ascusb_7735 | 869 |
| Ureaplasma | Ascusb_7748 | 870 |
| Acetanaerobacterium | Ascusb_7752 | 871 |
| Slackia | Ascusb_7753 | 872 |
| Lachnospiracea_incertae_sedis | Ascusb_7761 | 873 |
| Oscillibacter | Ascusb_7763 | 874 |
| Prevotella | Ascusb_7765 | 875 |
| Proteiniphilum | Ascusb_7767 | 876 |
| Spirochaeta | Ascusb_7784 | 877 |
| Ruminococcus | Ascusb_7788 | 878 |
| Prevotella | Ascusb_7792 | 879 |
| Butyricicoccus | Ascusb_7796 | 880 |
| Devosia | Ascusb_7817 | 881 |
| Anaeroplasma | Ascusb_7828 | 882 |
| Oscillibacter | Ascusb_7829 | 883 |
| Barnesiella | Ascusb_7831 | 884 |
| Atopobium | Ascusb_7837 | 885 |
| Clostridium_XlVa | Ascusb_7838 | 886 |
| Methanobrevibacter | Ascusb_7839 | 887 |
| Butyricimonas | Ascusb_7849 | 888 |
| Butyricimonas | Ascusb_7853 | 889 |
| Asaccharobacter | Ascusb_7855 | 890 |
| Enhydrobacter | Ascusb_7871 | 891 |
| Treponema | Ascusb_7872 | 892 |
| Clostridium_XlVa | Ascusb_7873 | 893 |
| Adlercreutzia | Ascusb_7874 | 894 |
| Prevotella | Ascusb_7890 | 895 |
| Pseudoflavonifractor | Ascusb_7896 | 896 |
| Syntrophococcus | Ascusb_7898 | 897 |
| Clostridium_IV | Ascusb_7901 | 898 |
| Demequina | Ascusb_7902 | 899 |
| Lachnospiracea_incertae_sedis | Ascusb_7904 | 900 |
| Saccharofermentans | Ascusb_7924 | 901 |
| Sphaerisporangium | Ascusb_7925 | 902 |
| Anaeroplasma | Ascusb_7939 | 903 |
| Geobacillus | Ascusb_7958 | 904 |
| Prevotella | Ascusb_7959 | 905 |
| Clostridium_XlVa | Ascusb_7967 | 906 |
| Victivallis | Ascusb_7973 | 907 |
| Bacteroides | Ascusb_7989 | 908 |
| Demequina | Ascusb_7990 | 909 |
| Paraeggerthella | Ascusb_7994 | 910 |
| Paraprevotella | Ascusb_7996 | 911 |
| Pseudoflavonifractor | Ascusb_8013 | 912 |
| Roseburia | Ascusb_8018 | 913 |
| Gelidibacter | Ascusb_8038 | 914 |
| Clostridium_IV | Ascusb_8069 | 915 |
| Rhizobium | Ascusb_8076 | 916 |
| Acholeplasma | Ascusb_8081 | 917 |
| Clostridium_XlVa | Ascusb_8084 | 918 |
| Bacteroides | Ascusb_8091 | 919 |
| Bacteroides | Ascusb_8105 | 920 |
| Papillibacter | Ascusb_8107 | 921 |
| Fusibacter | Ascusb_8113 | 922 |
| Coraliomargarita | Ascusb_8120 | 923 |
| Papillibacter | Ascusb_8123 | 924 |
| Clostridium_XlVa | Ascusb_8149 | 925 |
| Acholeplasma | Ascusb_8167 | 926 |
| Catenibacterium | Ascusb_8169 | 927 |
| Clostridium_IV | Ascusb_8172 | 928 |
| Clostridium_IV | Ascusb_8173 | 929 |
| Clostridium_IV | Ascusb_8179 | 930 |
| Nitrobacter | Ascusb_8182 | 931 |
| Victivallis | Ascusb_8189 | 932 |
| Selenomonas | Ascusb_8196 | 933 |
| Enterorhabdus | Ascusb_8200 | 934 |
| Eubacterium | Ascusb_8202 | 935 |
| Roseburia | Ascusb_8206 | 936 |
| Prevotella | Ascusb_8211 | 937 |
| Asaccharobacter | Ascusb_8222 | 938 |
| Bacteroides | Ascusb_8230 | 939 |
| Clostridium_XlVa | Ascusb_8238 | 940 |
| Gelidibacter | Ascusb_8245 | 941 |
| Brevundimonas | Ascusb_8254 | 942 |
| Clostridium_XlVa | Ascusb_8260 | 943 |
| Prevotella | Ascusb_8266 | 944 |
| Oscillibacter | Ascusb_8268 | 945 |
| Asteroleplasma | Ascusb_8280 | 946 |
| Anaeroplasma | Ascusb_8283 | 947 |
| Oscillibacter | Ascusb_8311 | 948 |
| Bilophila | Ascusb_8317 | 949 |
| Oscillibacter | Ascusb_8318 | 950 |
| Clostridium_IV | Ascusb_8320 | 951 |
| Prevotella | Ascusb_8321 | 952 |
| Geosporobacter | Ascusb_8329 | 953 |
| Butyricimonas | Ascusb_8363 | 954 |
| Pseudoflavonifractor | Ascusb_8366 | 955 |
| Barnesiella | Ascusb_8367 | 956 |
| Selenomonas | Ascusb_8370 | 957 |
| Prevotella | Ascusb_8374 | 958 |
| Enterorhabdus | Ascusb_8379 | 959 |
| Oscillibacter | Ascusb_8384 | 960 |
| Pelotomaculum | Ascusb_8394 | 961 |
| Cellulosilyticum | Ascusb_8396 | 962 |
| Clostridium_IV | Ascusb_8402 | 963 |
| Parabacteroides | Ascusb_8410 | 964 |
| Papillibacter | Ascusb_8413 | 965 |
| Bacteroides | Ascusb_8439 | 966 |
| Prevotella | Ascusb_8440 | 967 |
| Hydrogenoanaerobacterium | Ascusb_8447 | 968 |
| Clostridium_XlVa | Ascusb_8470 | 969 |
| Prevotella | Ascusb_8480 | 970 |
| Clostridium_IV | Ascusb_8484 | 971 |
| Howardella | Ascusb_8487 | 972 |
| Slackia | Ascusb_8498 | 973 |
| Methylobacter | Ascusb_8500 | 974 |
| Treponema | Ascusb_8508 | 975 |
| Clostridium_XlVa | Ascusb_8514 | 976 |
| Devosia | Ascusb_8518 | 977 |
| Ruminococcus | Ascusb_8537 | 978 |
| Lachnospiracea_incertae_sedis | Ascusb_8569 | 979 |
| Clostridium_III | Ascusb_8580 | 980 |
| Methanobrevibacter | Ascusb_8595 | 981 |
| Paraprevotella | Ascusb_8600 | 982 |
| Desulfobulbus | Ascusb_8627 | 983 |
| Butyricicoccus | Ascusb_8639 | 984 |
| Clostridium_XlVa | Ascusb_8657 | 985 |
| Dialister | Ascusb_8669 | 986 |
| Selenomonas | Ascusb_8681 | 987 |
| Spirochaeta | Ascusb_8696 | 988 |
| Clostridium_IV | Ascusb_8712 | 989 |
| Cellulosilyticum | Ascusb_8713 | 990 |
| Prevotella | Ascusb_8714 | 991 |
| Pseudoflavonifractor | Ascusb_8715 | 992 |
| Clostridium_III | Ascusb_8728 | 993 |
| Oscillibacter | Ascusb_8733 | 994 |
| Faecalibacterium | Ascusb_8746 | 995 |
| Clostridium_XlVb | Ascusb_8753 | 996 |
| Eubacterium | Ascusb_8758 | 997 |
| Clostridium_III | Ascusb_8762 | 998 |
| Prevotella | Ascusb_8769 | 999 |
| Paenibacillus | Ascusb_8771 | 1000 |
| Pedobacter | Ascusb_8782 | 1001 |
| Butyricicoccus | Ascusb_8786 | 1002 |
| Clostridium_XlVa | Ascusb_8787 | 1003 |
| Roseburia | Ascusb_8799 | 1004 |
| Hydrogenoanaerobacterium | Ascusb_8804 | 1005 |
| Adhaeribacter | Ascusb_8807 | 1006 |
| Eubacterium | Ascusb_8815 | 1007 |
| Bacteroides | Ascusb_8822 | 1008 |
| Victivallis | Ascusb_8835 | 1009 |
| Roseburia | Ascusb_8840 | 1010 |
| Treponema | Ascusb_8857 | 1011 |
| Prevotella | Ascusb_8860 | 1012 |
| Prevotella | Ascusb_8870 | 1013 |
| Hydrogenoanaerobacterium | Ascusb_8873 | 1014 |
| Clostridium_XlVa | Ascusb_8883 | 1015 |
| Bacteroides | Ascusb_8884 | 1016 |
| Bacteroides | Ascusb_8886 | 1017 |
| Lactobacillus | Ascusb_8888 | 1018 |
| Adlercreutzia | Ascusb_8892 | 1019 |
| Dethiosulfovibrio | Ascusb_8916 | 1020 |
| Lutispora | Ascusb_8934 | 1021 |
| Turicibacter | Ascusb_8942 | 1022 |
| Cyanobacteria | Ascusb_8953 | 1023 |
| Clostridium_{—}sensu_{—}stricto | Ascusb_8956 | 1024 |
| Cyanobacteria | Ascusb_8972 | 1025 |
| Bulleidia | Ascusb_9004 | 1026 |
| Aquiflexum | Ascusb_9015 | 1027 |
| Lachnospiracea_incertae_sedis | Ascusb_9026 | 1028 |
| Lachnospiracea_incertae_sedis | Ascusb_9073 | 1029 |
| Clostridium_III | Ascusb_9075 | 1030 |
| Roseburia | Ascusb_9081 | 1031 |
| Glaciecola | Ascusb_9086 | 1032 |
| Clostridium_XlVa | Ascusb_9090 | 1033 |
| Hydrogenoanaerobacterium | Ascusb_9095 | 1034 |
| Clostridium_IV | Ascusb_9097 | 1035 |
| Sphaerobacter | Ascusb_9098 | 1036 |
| Cyanobacteria | Ascusb_9105 | 1037 |
| Prevotella | Ascusb_9109 | 1038 |
| Turicibacter | Ascusb_9112 | 1039 |
| Ruminococcus | Ascusb_9122 | 1040 |
| Clostridium_IV | Ascusb_9131 | 1041 |
| Clostridium_XlVa | Ascusb_9145 | 1042 |
| Saccharofermentans | Ascusb_9151 | 1043 |
| Clostridium_XlVb | Ascusb_9154 | 1044 |
| Ruminococcus | Ascusb_9160 | 1045 |
| Fibrobacter | Ascusb_9169 | 1046 |
| Proteiniclasticum | Ascusb_9176 | 1047 |
| Anaeroplasma | Ascusb_9178 | 1048 |
| Cyanobacteria | Ascusb_9184 | 1049 |
| Algoriphagus | Ascusb_9189 | 1050 |
| Clostridium_XlVa | Ascusb_9196 | 1051 |
| Howardella | Ascusb_9200 | 1052 |
| Clostridium_XlVa | Ascusb_9201 | 1053 |
| Barnesiella | Ascusb_9211 | 1054 |
| Clostridium_IV | Ascusb_9234 | 1055 |
| Prevotella | Ascusb_9238 | 1056 |
| Clostridium_XlVa | Ascusb_9251 | 1057 |
| Butyricimonas | Ascusb_9261 | 1058 |
| Blautia | Ascusb_9264 | 1059 |
| Prevotella | Ascusb_9274 | 1060 |
| Clostridium_XlVa | Ascusb_9277 | 1061 |
| Blautia | Ascusb_9282 | 1062 |
| Clostridium_IV | Ascusb_9291 | 1063 |
| Flavobacterium | Ascusb_9292 | 1064 |
| Prevotella | Ascusb_9300 | 1065 |
| Clostridium_XlVa | Ascusb_9301 | 1066 |
| Clostridium_XlVa | Ascusb_9302 | 1067 |
| Eubacterium | Ascusb_9313 | 1068 |
| Butyricicoccus | Ascusb_9340 | 1069 |
| Fluviicola | Ascusb_9343 | 1070 |
| Anaerovibrio | Ascusb_9354 | 1071 |
| Blautia | Ascusb_9355 | 1072 |
| Verrucomicrobia | Ascusb_9367 | 1073 |
| Clostridium_{—}sensu_{—}stricto | Ascusb_9368 | 1074 |
| Spirochaeta | Ascusb_9369 | 1075 |
| Clostridium_XI | Ascusb_9372 | 1076 |
| Anaerovorax | Ascusb_9376 | 1077 |
| Roseburia | Ascusb_9381 | 1078 |
| Mucilaginibacter | Ascusb_9388 | 1079 |
| Clostridium_XI | Ascusb_9389 | 1080 |
| Lachnospiracea_incertae_sedis | Ascusb_9401 | 1081 |
| Prevotella | Ascusb_9402 | 1082 |
| Clostridium_III | Ascusb_9411 | 1083 |
| Lachnospiracea_incertae_sedis | Ascusb_9415 | 1084 |
| Coprococcus | Ascusb_9427 | 1085 |
| Acholeplasma | Ascusb_9432 | 1086 |
| Clostridium_III | Ascusb_9453 | 1087 |
| Lactobacillus | Ascusb_9454 | 1088 |
| Clostridium_IV | Ascusb_9455 | 1089 |
| Prevotella | Ascusb_9465 | 1090 |
| Bifidobacterium | Ascusb_9497 | 1091 |
| Adhaeribacter | Ascusb_9507 | 1092 |
| Hydrogenoanaerobacterium | Ascusb_9518 | 1093 |
| Acetivibrio | Ascusb_9521 | 1094 |
| Cyanobacteria | Ascusb_9532 | 1095 |
| Flammeovirga | Ascusb_9535 | 1096 |
| Dethiosulfovibrio | Ascusb_9543 | 1097 |
| Hippea | Ascusb_9545 | 1098 |
| Faecalibacterium | Ascusb_9558 | 1099 |
| Spirochaeta | Ascusb_9559 | 1100 |
| Brevundimonas | Ascusb_9563 | 1101 |
| Mucilaginibacter | Ascusb_9564 | 1102 |
| Hydrogenoanaerobacterium | Ascusb_9580 | 1103 |
| Asaccharobacter | Ascusb_9587 | 1104 |
| Clostridium_IV | Ascusb_9591 | 1105 |
| Mogibacterium | Ascusb_9605 | 1106 |
| Clostridium_IV | Ascusb_9617 | 1107 |
| Oscillibacter | Ascusb_9619 | 1108 |
| Clostridium_XlVa | Ascusb_9628 | 1109 |
| Faecalibacterium | Ascusb_9640 | 1110 |
| Altererythrobacter | Ascusb_9644 | 1111 |
| Gelidibacter | Ascusb_9656 | 1112 |
| Prevotella | Ascusb_9662 | 1113 |
| Anaerovorax | Ascusb_9663 | 1114 |
| Riemerella | Ascusb_9664 | 1115 |
| Sphingobacterium | Ascusb_9666 | 1116 |
| Syntrophococcus | Ascusb_9668 | 1117 |
| Bacteroides | Ascusb_9669 | 1118 |
| Papillibacter | Ascusb_9678 | 1119 |
| Butyricicoccus | Ascusb_9679 | 1120 |
| Clostridium_IV | Ascusb_9680 | 1121 |
| Hydrogenoanaerobacterium | Ascusb_9684 | 1122 |
| Marvinbryantia | Ascusb_9688 | 1123 |
| Brevibacillus | Ascusb_9701 | 1124 |
| Clostridium_IV | Ascusb_9715 | 1125 |
| Prevotella | Ascusb_9719 | 1126 |
| Clostridium_IV | Ascusb_9734 | 1127 |
| Aminobacter | Ascusb_9759 | 1128 |
| Sporotomaculum | Ascusb_9764 | 1129 |
| Clostridium_IV | Ascusb_9779 | 1130 |
| Pedobacter | Ascusb_9780 | 1131 |
| Victivallis | Ascusb_9782 | 1132 |
| Gelidibacter | Ascusb_9792 | 1133 |
| Prevotella | Ascusb_9824 | 1134 |
| Wautersiella | Ascusb_9839 | 1135 |
| Slackia | Ascusb_9846 | 1136 |
| Pyramidobacter | Ascusb_9851 | 1137 |
| Lachnospiracea_incertae_sedis | Ascusb_9862 | 1138 |
| Clostridium_XlVa | Ascusb_9869 | 1139 |
| Prevotella | Ascusb_9876 | 1140 |
| Lentisphaera | Ascusb_9886 | 1141 |
| Desulfoluna | Ascusb_9895 | 1142 |
| Clostridium_III | Ascusb_9897 | 1143 |
| Clostridium_{—}sensu_{—}stricto | Ascusb_9925 | 1144 |
| Prevotella | Ascusb_9929 | 1145 |
| Clostridium_III | Ascusb_9934 | 1146 |
| Clostridium_IV | Ascusb_9949 | 1147 |
| Prevotella | Ascusb_9951 | 1148 |
| Cyanobacteria | Ascusb_9954 | 1149 |
| Helicobacter | Ascusb_9958 | 1150 |
| Clostridium_XlVa | Ascusb_9977 | 1151 |
| Coprococcus | Ascusb_9982 | 1152 |
| Bradyrhizobium | Ascusb_9993 | 1153 |
| Clostridium_IV | Ascusb_9996 | 1154 |
| Sphingobacterium | Ascusb_10002 | 1155 |
| Gelidibacter | Ascusb_10023 | 1156 |
| Vasilyevaea | Ascusb_10029 | 1157 |
| Eubacterium | Ascusb_10030 | 1158 |
| Clostridium_XlVa | Ascusb_10034 | 1159 |
| Eubacterium | Ascusb_10044 | 1160 |
| Syntrophococcus | Ascusb_10045 | 1161 |
| Prevotella | Ascusb_10050 | 1162 |
| Treponema | Ascusb_10057 | 1163 |
| Anaerovorax | Ascusb_10058 | 1164 |
| Erysipelotrichaceae_incertae_sedis | Ascusb_10059 | 1165 |
| Sulfurovum | Ascusb_10084 | 1166 |
| Clostridium_IV | Ascusb_10085 | 1167 |
| Papillibacter | Ascusb_10087 | 1168 |
| Paracoccus | Ascusb_10094 | 1169 |
| Hydrogenoanaerobacterium | Ascusb_10102 | 1170 |
| Adhaeribacter | Ascusb_10121 | 1171 |
| Lachnospiracea_incertae_sedis | Ascusb_10126 | 1172 |
| Bacteroides | Ascusb_10127 | 1173 |
| Hydrogenoanaerobacterium | Ascusb_10129 | 1174 |
| Telmatospirillum | Ascusb_10138 | 1175 |
| Clostridium_XlVa | Ascusb_10144 | 1176 |
| Hydrogenoanaerobacterium | Ascusb_10147 | 1177 |
| Clostridium_IV | Ascusb_10156 | 1178 |
| Vasilyevaea | Ascusb_10164 | 1179 |
| Anaeroplasma | Ascusb_10177 | 1180 |
| Sporotomaculum | Ascusb_10193 | 1181 |
| Clostridium_IV | Ascusb_10194 | 1182 |
| Enterorhabdus | Ascusb_10204 | 1183 |
| Bacteroides | Ascusb_10208 | 1184 |
| Anaerotruncus | Ascusb_10210 | 1185 |
| Rhodopirellula | Ascusb_10215 | 1186 |
| Clostridium_XlVa | Ascusb_10221 | 1187 |
| Gelidibacter | Ascusb_10243 | 1188 |
| Anaerofustis | Ascusb_10268 | 1189 |
| Butyricicoccus | Ascusb_10269 | 1190 |
| Butyricicoccus | Ascusb_10278 | 1191 |
| Clostridium_XlVa | Ascusb_10281 | 1192 |
| Cryptanaerobacter | Ascusb_10284 | 1193 |
| Clostridium_XlVa | Ascusb_10299 | 1194 |
| Mogibacterium | Ascusb_10309 | 1195 |
| Syntrophococcus | Ascusb_10313 | 1196 |
| Bacteroides | Ascusb_10325 | 1197 |
| Treponema | Ascusb_10327 | 1198 |
| Coraliomargarita | Ascusb_10344 | 1199 |
| Ruminococcus | Ascusb_10368 | 1200 |
| Prevotella | Ascusb_10374 | 1201 |
| Pseudaminobacter | Ascusb_10380 | 1202 |
| Prevotella | Ascusb_10392 | 1203 |
| Treponema | Ascusb_10450 | 1204 |
| Syntrophococcus | Ascusb_10456 | 1205 |
| Clostridium_IV | Ascusb_10457 | 1206 |
| Tenacibaculum | Ascusb_10462 | 1207 |
| Parabacteroides | Ascusb_10466 | 1208 |
| Luteimonas | Ascusb_10469 | 1209 |
| Eubacterium | Ascusb_10488 | 1210 |
| Roseburia | Ascusb_10495 | 1211 |
| Oscillibacter | Ascusb_10504 | 1212 |
| Cyanobacteria | Ascusb_10529 | 1213 |
| Prevotella | Ascusb_10547 | 1214 |
| Clostridium_IV | Ascusb_10548 | 1215 |
| Treponema | Ascusb_10557 | 1216 |
| Clostridium_IV | Ascusb_10561 | 1217 |
| Victivallis | Ascusb_10562 | 1218 |
| Clostridium_XlVa | Ascusb_10576 | 1219 |
| Oscillibacter | Ascusb_10586 | 1220 |
| Papillibacter | Ascusb_10598 | 1221 |
| Cellulosilyticum | Ascusb_10604 | 1222 |
| Treponema | Ascusb_10607 | 1223 |
| Ruminococcus | Ascusb_10609 | 1224 |
| Coraliomargarita | Ascusb_10612 | 1225 |
| Butyricicoccus | Ascusb_10613 | 1226 |
| Blautia | Ascusb_10615 | 1227 |
| Lachnospiracea_incertae_sedis | Ascusb_10617 | 1228 |
| Prevotella | Ascusb_10622 | 1229 |
| Clostridium_IV | Ascusb_10623 | 1230 |
| Clostridium_IV | Ascusb_10635 | 1231 |
| Clostridium_III | Ascusb_10655 | 1232 |
| Neptunomonas | Ascusb_10677 | 1233 |
| Clostridium_IV | Ascusb_10682 | 1234 |
| Howardella | Ascusb_10685 | 1235 |
| Clostridium_IV | Ascusb_10687 | 1236 |
| Roseburia | Ascusb_10711 | 1237 |
| Oscillibacter | Ascusb_10739 | 1238 |
| Clostridium_XlVa | Ascusb_10740 | 1239 |
| Clostridium_IV | Ascusb_10741 | 1240 |
| Sporobacter | Ascusb_10749 | 1241 |
| Clostridium_XlVa | Ascusb_10769 | 1242 |
| Butyricicoccus | Ascusb_10774 | 1243 |
| Clostridium_XlVa | Ascusb_10787 | 1244 |
| Filomicrobium | Ascusb_10788 | 1245 |
| Bacteroides | Ascusb_10790 | 1246 |
| Clostridium_XlVa | Ascusb_10809 | 1247 |
| Brevundimonas | Ascusb_10812 | 1248 |
| Clostridium_IV | Ascusb_10817 | 1249 |
| Paracoccus | Ascusb_10818 | 1250 |
| Schlegelella | Ascusb_10837 | 1251 |
| Clostridium_XI | Ascusb_10844 | 1252 |
| Diaphorobacter | Ascusb_10847 | 1253 |
| Clostridium_{—}sensu_{—}stricto | Ascusb_10858 | 1254 |
| Saccharopolyspora | Ascusb_10863 | 1255 |
| Prevotella | Ascusb_10871 | 1256 |
| Eggerthella | Ascusb_10878 | 1257 |
| Gelidibacter | Ascusb_10888 | 1258 |
| Prevotella | Ascusb_10899 | 1259 |
| Pseudomonas | Ascusb_10922 | 1260 |
| Prevotella | Ascusb_10927 | 1261 |
| Prevotella | Ascusb_10937 | 1262 |
| Prevotella | Ascusb_10940 | 1263 |
| Brevundimonas | Ascusb_10945 | 1264 |
| Bacteroides | Ascusb_10982 | 1265 |
| Clostridium_XlVa | Ascusb_11015 | 1266 |
| Photobacterium | Ascusb_11027 | 1267 |
| Clostridium_XlVa | Ascusb_11031 | 1268 |
| Clostridium_XlVb | Ascusb_11032 | 1269 |
| Prevotella | Ascusb_11037 | 1270 |
| Clostridium_IV | Ascusb_11046 | 1271 |
| Anaeroplasma | Ascusb_11051 | 1272 |
| Caldilinea | Ascusb_11053 | 1273 |
| Clostridium_XlVa | Ascusb_11059 | 1274 |
| Victivallis | Ascusb_11061 | 1275 |
| Brevundimonas | Ascusb_11063 | 1276 |
| Cyanobacteria | Ascusb_11074 | 1277 |
| Prevotella | Ascusb_11120 | 1278 |
| Slackia | Ascusb_11124 | 1279 |
| Pedobacter | Ascusb_11125 | 1280 |
| Prevotella | Ascusb_11129 | 1281 |
| Trueperella | Ascusb_11141 | 1282 |
| Oscillibacter | Ascusb_11170 | 1283 |
| Cyanobacteria | Ascusb_11185 | 1284 |
| Victivallis | Ascusb_11199 | 1285 |
| Bacteroides | Ascusb_11200 | 1286 |
| Micrococcus | Ascusb_11207 | 1287 |
| Olivibacter | Ascusb_11209 | 1288 |
| Anaerophaga | Ascusb_11211 | 1289 |
| Selenomonas | Ascusb_11214 | 1290 |
| Megasphaera | Ascusb_11219 | 1291 |
| Clostridium_XlVa | Ascusb_11221 | 1292 |
| Clostridium_XlVa | Ascusb_11241 | 1293 |
| Eubacterium | Ascusb_11245 | 1294 |
| Cyanobacteria | Ascusb_11253 | 1295 |
| Clostridium_XlVa | Ascusb_11287 | 1296 |
| Treponema | Ascusb_11288 | 1297 |
| Cryptanaerobacter | Ascusb_11289 | 1298 |
| Xanthomonas | Ascusb_11301 | 1299 |
| Asteroleplasma | Ascusb_11302 | 1300 |
| Cyanobacteria | Ascusb_11315 | 1301 |
| Sporotomaculum | Ascusb_11321 | 1302 |
| Bacteroides | Ascusb_11324 | 1303 |
| Asaccharobacter | Ascusb_11330 | 1304 |
| Clostridium_IV | Ascusb_11343 | 1305 |
| Cyanobacteria | Ascusb_11348 | 1306 |
| Clostridium_XlVa | Ascusb_11362 | 1307 |
| Treponema | Ascusb_11365 | 1308 |
| Prevotella | Ascusb_11384 | 1309 |
| Turicibacter | Ascusb_11388 | 1310 |
| Clostridium_IV | Ascusb_11389 | 1311 |
| Clostridium_IV | Ascusb_11397 | 1312 |
| Clostridium_IV | Ascusb_11403 | 1313 |
| Oscillibacter | Ascusb_11410 | 1314 |
| Deinococcus | Ascusb_11423 | 1315 |
| Pedobacter | Ascusb_11427 | 1316 |
| Anaerovorax | Ascusb_11435 | 1317 |
| Clostridium_IV | Ascusb_11442 | 1318 |
| Bacteroides | Ascusb_11445 | 1319 |
| Clostridium_IV | Ascusb_11461 | 1320 |
| Rhodococcus | Ascusb_11463 | 1321 |
| Treponema | Ascusb_11464 | 1322 |
| Mucilaginibacter | Ascusb_11475 | 1323 |
| Clostridium_XlVa | Ascusb_11503 | 1324 |
| Olivibacter | Ascusb_11510 | 1325 |
| Clostridium_XlVa | Ascusb_11519 | 1326 |
| Barnesiella | Ascusb_11581 | 1327 |
| Clostridium_XlVb | Ascusb_11584 | 1328 |
| Gelidibacter | Ascusb_11600 | 1329 |
| Methanobrevibacter | Ascusb_11602 | 1330 |
| Anaerotruncus | Ascusb_11612 | 1331 |
| Lachnospiracea_incertae_sedis | Ascusb_11653 | 1332 |
| Erysipelotrichaceae_incertae_sedis | Ascusb_11656 | 1333 |
| Mesorhizobium | Ascusb_11681 | 1334 |
| Clostridium_XI | Ascusb_11695 | 1335 |
| Planctomyces | Ascusb_11698 | 1336 |
| Aerococcus | Ascusb_11713 | 1337 |
| Victivallis | Ascusb_11721 | 1338 |
| Cyanobacteria | Ascusb_11736 | 1339 |
| Bacteroides | Ascusb_11752 | 1340 |
| Clostridium_XI | Ascusb_11753 | 1341 |
| Clostridium_XlVa | Ascusb_11757 | 1342 |
| Ruminococcus | Ascusb_11761 | 1343 |
| Saccharofermentans | Ascusb_11780 | 1344 |
| Oscillibacter | Ascusb_11781 | 1345 |
| Lachnospiracea_incertae_sedis | Ascusb_11783 | 1346 |
| Fibrobacter | Ascusb_11793 | 1347 |
| Kiloniella | Ascusb_11809 | 1348 |
| Olivibacter | Ascusb_11819 | 1349 |
| Clostridium_IV | Ascusb_11821 | 1350 |
| Spirochaeta | Ascusb_11865 | 1351 |
| Prevotella | Ascusb_11870 | 1352 |
| Olivibacter | Ascusb_11881 | 1353 |
| Prevotella | Ascusb_11884 | 1354 |
| Parabacteroides | Ascusb_11885 | 1355 |
| Prevotella | Ascusb_11892 | 1356 |
| Leifsonia | Ascusb_11896 | 1357 |
| Clostridium_IV | Ascusb_11901 | 1358 |
| Victivallis | Ascusb_11903 | 1359 |
| Treponema | Ascusb_11929 | 1360 |
| Cyanobacteria | Ascusb_11952 | 1361 |
| Sporotomaculum | Ascusb_11954 | 1362 |
| Spirochaeta | Ascusb_11955 | 1363 |
| Clostridium_III | Ascusb_11960 | 1364 |
| Clostridium_XlVa | Ascusb_11962 | 1365 |
| Anaerovorax | Ascusb_11963 | 1366 |
| Oscillibacter | Ascusb_11964 | 1367 |
| Victivallis | Ascusb_11988 | 1368 |
| Lachnospiracea_incertae_sedis | Ascusb_11993 | 1369 |
| Spirochaeta | Ascusb_11997 | 1370 |
| Clostridium_XlVb | Ascusb_12000 | 1371 |
| Oscillibacter | Ascusb_12004 | 1372 |
| Prevotella | Ascusb_12013 | 1373 |
| Anaeroplasma | Ascusb_12046 | 1374 |
| Adlercreutzia | Ascusb_12054 | 1375 |
| Clostridium_XlVa | Ascusb_12061 | 1376 |
| Beijerinckia | Ascusb_12069 | 1377 |
| Prevotella | Ascusb_12106 | 1378 |
| Coprococcus | Ascusb_12110 | 1379 |
| Lentisphaera | Ascusb_12116 | 1380 |
| Clostridium_XlVa | Ascusb_12119 | 1381 |
| Saccharofermentans | Ascusb_12127 | 1382 |
| Porphyrobacter | Ascusb_12128 | 1383 |
| Rhodobacter | Ascusb_12140 | 1384 |
| Oscillibacter | Ascusb_12153 | 1385 |
| Roseburia | Ascusb_12160 | 1386 |
| Prevotella | Ascusb_12175 | 1387 |
| Aquiflexum | Ascusb_12177 | 1388 |
| Rhodopirellula | Ascusb_12187 | 1389 |
| Bacteroides | Ascusb_12191 | 1390 |
| Bacteroides | Ascusb_12216 | 1391 |
| Clostridium_XlVa | Ascusb_12221 | 1392 |
| Clostridium_IV | Ascusb_12227 | 1393 |
| Prevotella | Ascusb_12243 | 1394 |
| Mogibacterium | Ascusb_12248 | 1395 |
| Prevotella | Ascusb_12252 | 1396 |
| Clostridium_XlVa | Ascusb_12269 | 1397 |
| Prevotella | Ascusb_12270 | 1398 |
| Capnocytophaga | Ascusb_12276 | 1399 |
| Acholeplasma | Ascusb_12282 | 1400 |
| Clostridium_IV | Ascusb_12310 | 1401 |
| Succinivibrio | Ascusb_12327 | 1402 |
| Pseudonocardia | Ascusb_12339 | 1403 |
| Clostridium_XlVa | Ascusb_12353 | 1404 |
| Butyricimonas | Ascusb_12354 | 1405 |
| Anaerovorax | Ascusb_12355 | 1406 |
| Prevotella | Ascusb_12383 | 1407 |
| Butyricimonas | Ascusb_12399 | 1408 |
| Parabacteroides | Ascusb_12407 | 1409 |
| Clostridium_XlVa | Ascusb_12413 | 1410 |
| Clostridium_XlVb | Ascusb_12417 | 1411 |
| Bacteroides | Ascusb_12428 | 1412 |
| Cyanobacteria | Ascusb_12452 | 1413 |
| Riemerella | Ascusb_12461 | 1414 |
| Anaeroplasma | Ascusb_12487 | 1415 |
| Ruminococcus | Ascusb_12489 | 1416 |
| Verrucomicrobia | Ascusb_12499 | 1417 |
| Lachnospiracea_incertae_sedis | Ascusb_12511 | 1418 |
| Syntrophococcus | Ascusb_12512 | 1419 |
| Clostridium_IV | Ascusb_12520 | 1420 |
| Barnesiella | Ascusb_12534 | 1421 |
| Olivibacter | Ascusb_12553 | 1422 |
| Clostridium_XlVa | Ascusb_12574 | 1423 |
| Cryptanaerobacter | Ascusb_12577 | 1424 |
| Saccharofermentans | Ascusb_12578 | 1425 |
| Clostridium_IV | Ascusb_12599 | 1426 |
| Coprococcus | Ascusb_12600 | 1427 |
| Barnesiella | Ascusb_12606 | 1428 |
| Clostridium_{—}sensu_{—}stricto | Ascusb_12618 | 1429 |
| Hydrogenoanaerobacterium | Ascusb_12627 | 1430 |
| Clostridium_XlVb | Ascusb_12628 | 1431 |
| Selenomonas | Ascusb_12661 | 1432 |
| Prevotella | Ascusb_12662 | 1433 |
| Hydrogenoanaerobacterium | Ascusb_12679 | 1434 |
| Spirochaeta | Ascusb_12703 | 1435 |
| Enterorhabdus | Ascusb_12704 | 1436 |
| Thermoanaerobacter | Ascusb_12709 | 1437 |
| Armatimonadetes | Ascusb_12719 | 1438 |
| Syntrophococcus | Ascusb_12723 | 1439 |
| Sphingobium | Ascusb_12731 | 1440 |
| Clostridium_XlVa | Ascusb_12737 | 1441 |
| Geosporobacter | Ascusb_12740 | 1442 |
| Enterorhabdus | Ascusb_12746 | 1443 |
| Verrucomicrobia | Ascusb_12747 | 1444 |
| Clostridium_XlVa | Ascusb_12749 | 1445 |
| Parabacteroides | Ascusb_12750 | 1446 |
| Cryptanaerobacter | Ascusb_12769 | 1447 |
| Anaeroplasma | Ascusb_12775 | 1448 |
| Spirochaeta | Ascusb_12779 | 1449 |
| Prevotella | Ascusb_12804 | 1450 |
| Roseburia | Ascusb_12819 | 1451 |
| Pedobacter | Ascusb_12826 | 1452 |
| Pedobacter | Ascusb_12835 | 1453 |
| Eggerthella | Ascusb_12838 | 1454 |
| Prevotella | Ascusb_12853 | 1455 |
| Rikenella | Ascusb_12873 | 1456 |
| Anaerophaga | Ascusb_12894 | 1457 |
| Spirochaeta | Ascusb_12901 | 1458 |
| Clostridium_IV | Ascusb_12910 | 1459 |
| Weissella | Ascusb_12931 | 1460 |
| Butyricicoccus | Ascusb_12946 | 1461 |
| Hahella | Ascusb_12953 | 1462 |
| Acholeplasma | Ascusb_12960 | 1463 |
| Clostridium_XlVa | Ascusb_12962 | 1464 |
| Cellulosilyticum | Ascusb_12987 | 1465 |
| Verrucomicrobia | Ascusb_12995 | 1466 |
| Clostridium_XlVa | Ascusb_13002 | 1467 |
| Pseudoflavonifractor | Ascusb_13028 | 1468 |
| Calditerricola | Ascusb_13035 | 1469 |
| Clostridium_IV | Ascusb_13039 | 1470 |
| Clostridium_IV | Ascusb_13050 | 1471 |
| Adlercreutzia | Ascusb_13054 | 1472 |
| Bulleidia | Ascusb_13088 | 1473 |
| Lachnospiracea_incertae_sedis | Ascusb_13089 | 1474 |
| Mucilaginibacter | Ascusb_13115 | 1475 |
| Victivallis | Ascusb_13128 | 1476 |
| Anaerovorax | Ascusb_13130 | 1477 |
| Clostridium_XlVb | Ascusb_13134 | 1478 |
| Clostridium_XlVa | Ascusb_13154 | 1479 |
| Prevotella | Ascusb_13155 | 1480 |
| Bacteroides | Ascusb_13163 | 1481 |
| Schwartzia | Ascusb_13165 | 1482 |
| Pyramidobacter | Ascusb_13226 | 1483 |
| Eubacterium | Ascusb_13230 | 1484 |
| Lachnospiracea_incertae_sedis | Ascusb_13244 | 1485 |
| Clostridium_XlVa | Ascusb_13249 | 1486 |
| Roseburia | Ascusb_13254 | 1487 |
| Clostridium_XlVb | Ascusb_13276 | 1488 |
| Enterorhabdus | Ascusb_13284 | 1489 |
| Pedobacter | Ascusb_13291 | 1490 |
| Clostridium_{—}sensu_{—}stricto | Ascusb_13296 | 1491 |
| Clostridium_XlVa | Ascusb_13328 | 1492 |
| Clostridium_III | Ascusb_13343 | 1493 |
| Desulfotomaculum | Ascusb_13349 | 1494 |
| Clostridium_IV | Ascusb_13353 | 1495 |
| Proteiniclasticum | Ascusb_13371 | 1496 |
| Prevotella | Ascusb_13412 | 1497 |
| Faecalibacterium | Ascusb_13417 | 1498 |
| Microbacterium | Ascusb_13419 | 1499 |
| Leucobacter | Ascusb_13424 | 1500 |
| Prevotella | Ascusb_13426 | 1501 |
| Sphingobacterium | Ascusb_13457 | 1502 |
| Fusibacter | Ascusb_13458 | 1503 |
| Howardella | Ascusb_13463 | 1504 |
| Pedobacter | Ascusb_13488 | 1505 |
| Caldilinea | Ascusb_13504 | 1506 |
| Turicibacter | Ascusb_13513 | 1507 |
| Clostridium_IV | Ascusb_13516 | 1508 |
| Alistipes | Ascusb_13546 | 1509 |
| Clostridium_XlVa | Ascusb_13547 | 1510 |
| Clostridium_XlVa | Ascusb_13567 | 1511 |
| Prevotella | Ascusb_13597 | 1512 |
| Clostridium_XlVa | Ascusb_13611 | 1513 |
| Butyricimonas | Ascusb_13648 | 1514 |
| Anaerovibrio | Ascusb_13663 | 1515 |
| Prevotella | Ascusb_13675 | 1516 |
| Pseudoflavonifractor | Ascusb_13679 | 1517 |
| Corynebacterium | Ascusb_13763 | 1518 |
| Leucobacter | Ascusb_13780 | 1519 |
| Kerstersia | Ascusb_13819 | 1520 |
| Slackia | Ascusb_13835 | 1521 |
| Lactococcus | Ascusb_13839 | 1522 |
| Prevotella | Ascusb_13840 | 1523 |
| Clostridium_IV | Ascusb_13845 | 1524 |
| Prevotella | Ascusb_13848 | 1525 |
| Bacteroides | Ascusb_13867 | 1526 |
| Lactobacillus | Ascusb_13881 | 1527 |
| Prevotella | Ascusb_13892 | 1528 |
| Clostridium_XlVa | Ascusb_13895 | 1529 |
| Clostridium_{—}sensu_{—}stricto | Ascusb_13903 | 1530 |
| Syntrophococcus | Ascusb_13904 | 1531 |
| Clostridium_XlVa | Ascusb_13921 | 1532 |
| Victivallis | Ascusb_13923 | 1533 |
| Bacteroides | Ascusb_13940 | 1534 |
| Acidobacteria | Ascusb_13951 | 1535 |
| Clostridium_XlVa | Ascusb_13953 | 1536 |
| Prevotella | Ascusb_13954 | 1537 |
| Verrucomicrobia | Ascusb_13955 | 1538 |
| Clostridium_XlVa | Ascusb_13981 | 1539 |
| Treponema | Ascusb_13982 | 1540 |
| Pyramidobacter | Ascusb_13983 | 1541 |
| Robinsoniella | Ascusb_13992 | 1542 |
| Lachnospiracea_incertae_sedis | Ascusb_13995 | 1543 |
| Clostridium_XI | Ascusb_13996 | 1544 |
| Bifidobacterium | Ascusb_14005 | 1545 |
| Bacteroides | Ascusb_14013 | 1546 |
| Gordonibacter | Ascusb_14016 | 1547 |
| Enterorhabdus | Ascusb_14055 | 1548 |
| Lactobacillus | Ascusb_14059 | 1549 |
| Bacteroides | Ascusb_14074 | 1550 |
| Prevotella | Ascusb_14086 | 1551 |
| Tannerella | Ascusb_14141 | 1552 |
| Bacteroides | Ascusb_14145 | 1553 |
| Prevotella | Ascusb_14151 | 1554 |
| Clostridium_XlVb | Ascusb_14163 | 1555 |
| Gelidibacter | Ascusb_14189 | 1556 |
| Cyanobacteria | Ascusb_14213 | 1557 |
| Rhodoplanes | Ascusb_14224 | 1558 |
| Selenomonas | Ascusb_14226 | 1559 |
| Escherichia/Shigella | Ascusb_14256 | 1560 |
| Rikenella | Ascusb_14278 | 1561 |
| Coprococcus | Ascusb_14285 | 1562 |
| Clostridium_{—}sensu_{—}stricto | Ascusb_14290 | 1563 |
| Hyphomicrobium | Ascusb_14304 | 1564 |
| Erysipelotrichaceae_incertae_sedis | Ascusb_14320 | 1565 |
| Verrucomicrobia | Ascusb_14324 | 1566 |
| Staphylococcus | Ascusb_14335 | 1567 |
| Verrucomicrobia | Ascusb_14358 | 1568 |
| Victivallis | Ascusb_14359 | 1569 |
| Selenomonas | Ascusb_14423 | 1570 |
| Desulfobulbus | Ascusb_14425 | 1571 |
| Clostridium_III | Ascusb_14450 | 1572 |
| Spirochaeta | Ascusb_14451 | 1573 |
| Kordia | Ascusb_14514 | 1574 |
| Bosea | Ascusb_14521 | 1575 |
| Enterococcus | Ascusb_14525 | 1576 |
| Clostridium_III | Ascusb_14530 | 1577 |
| Xanthobacter | Ascusb_14538 | 1578 |
| Lactobacillus | Ascusb_14555 | 1579 |
| Prevotella | Ascusb_14583 | 1580 |
| Acidaminococcus | Ascusb_14595 | 1581 |
| Eubacterium | Ascusb_14596 | 1582 |
| Bacteroides | Ascusb_14611 | 1583 |
| Clostridium_XlVa | Ascusb_14613 | 1584 |
| Lactobacillus | Ascusb_14626 | 1585 |
| Devosia | Ascusb_14628 | 1586 |
| Pedobacter | Ascusb_14667 | 1587 |
| Clostridium_IV | Ascusb_14747 | 1588 |
| Clostridium_XlVa | Ascusb_14785 | 1589 |
| Corynebacterium | Ascusb_14790 | 1590 |
| Spirochaeta | Ascusb_14792 | 1591 |
| Anaeroplasma | Ascusb_14828 | 1592 |
| Clostridium_XlVa | Ascusb_14869 | 1593 |
| Lachnospiracea_incertae_sedis | Ascusb_14888 | 1594 |
| Saccharofermentans | Ascusb_14898 | 1595 |
| Slackia | Ascusb_14906 | 1596 |
| Limibacter | Ascusb_14951 | 1597 |
| Sphingobium | Ascusb_14952 | 1598 |
| Clostridium_XlVa | Ascusb_14987 | 1599 |
| Riemerella | Ascusb_14990 | 1600 |
| Saccharofermentans | Ascusb_15032 | 1601 |
| Bacteroides | Ascusb_15048 | 1602 |
| Prevotella | Ascusb_15076 | 1603 |
| Selenomonas | Ascusb_15097 | 1604 |
| Victivallis | Ascusb_15122 | 1605 |
| Howardella | Ascusb_15128 | 1606 |
| Pelospora | Ascusb_15132 | 1607 |
| Clostridium_{—}sensu_{—}stricto | Ascusb_15151 | 1608 |
| Selenomonas | Ascusb_15156 | 1609 |
| Fibrobacter | Ascusb_15181 | 1610 |
| Clostridium_III | Ascusb_15215 | 1611 |
| Sphingomonas | Ascusb_15220 | 1612 |
| Selenomonas | Ascusb_15226 | 1613 |
| Eggerthella | Ascusb_15326 | 1614 |
| Treponema | Ascusb_15352 | 1615 |
| Mogibacterium | Ascusb_15357 | 1616 |
| Adlercreutzia | Ascusb_15390 | 1617 |
| Selenomonas | Ascusb_15394 | 1618 |
| Methylomicrobium | Ascusb_15404 | 1619 |
| Leuconostoc | Ascusb_15413 | 1620 |
| Pyramidobacter | Ascusb_15427 | 1621 |
| Butyrivibrio | Ascusb_15438 | 1622 |
| Bacteroides | Ascusb_15454 | 1623 |
| Butyricimonas | Ascusb_15455 | 1624 |
| Ruminococcus | Ascusb_15461 | 1625 |
| Clostridium_{—}sensu_{—}stricto | Ascusb_15482 | 1626 |
| Butyrivibrio | Ascusb_15488 | 1627 |
| Corynebacterium | Ascusb_15494 | 1628 |
| Proteiniborus | Ascusb_15526 | 1629 |
| Spirochaeta | Ascusb_15539 | 1630 |
| Acetitomaculum | Ascusb_15549 | 1631 |
| Selenomonas | Ascusb_15552 | 1632 |
| Altererythrobacter | Ascusb_15556 | 1633 |
| Atopobium | Ascusb_15587 | 1634 |
| Clostridium_IV | Ascusb_15615 | 1635 |
| Clostridium_XlVa | Ascusb_15624 | 1636 |
| Clostridium_XlVa | Ascusb_15695 | 1637 |
| Clostridium_IV | Ascusb_15703 | 1638 |
| Clostridium_III | Ascusb_15720 | 1639 |
| Candidate phylum TM7 | Ascusb_15737 | 1640 |
| Desulfotomaculum | Ascusb_15741 | 1641 |
| Pedobacter | Ascusb_15746 | 1642 |
| Bacteroides | Ascusb_15750 | 1643 |
| Asaccharobacter | Ascusb_15754 | 1644 |
| Microbacterium | Ascusb_15768 | 1645 |
| Treponema | Ascusb_15824 | 1646 |
| Dethiosulfovibrio | Ascusb_15830 | 1647 |
| Oscillibacter | Ascusb_15832 | 1648 |
| Selenomonas | Ascusb_15846 | 1649 |
| Eubacterium | Ascusb_15864 | 1650 |
| Ruminococcus | Ascusb_15877 | 1651 |
| Treponema | Ascusb_15915 | 1652 |
| Spirochaeta | Ascusb_15951 | 1653 |
| Roseburia | Ascusb_15963 | 1654 |
| Ruminococcus | Ascusb_15992 | 1655 |
| Butyricimonas | Ascusb_16010 | 1656 |
| Pedobacter | Ascusb_16051 | 1657 |
| Spirochaeta | Ascusb_16066 | 1658 |
| Parabacteroides | Ascusb_16101 | 1659 |
| Methylococcus | Ascusb_16111 | 1660 |
| Enterorhabdus | Ascusb_16113 | 1661 |
| Clostridium_{—}sensu_{—}stricto | Ascusb_16124 | 1662 |
| Gelidibacter | Ascusb_16149 | 1663 |
| Sporobacter | Ascusb_16168 | 1664 |
| Pedobacter | Ascusb_16185 | 1665 |
| Cyanobacteria | Ascusb_16194 | 1666 |
| Syntrophococcus | Ascusb_16198 | 1667 |
| Slackia | Ascusb_16200 | 1668 |
| Mogibacterium | Ascusb_16215 | 1669 |
| Prevotella | Ascusb_16239 | 1670 |
| Pseudoflavonifractor | Ascusb_16244 | 1671 |
| Veillonella | Ascusb_16257 | 1672 |
| Clostridium_XlVa | Ascusb_16278 | 1673 |
| Bacillus | Ascusb_16299 | 1674 |
| Pedobacter | Ascusb_16316 | 1675 |
| Clostridium_IV | Ascusb_16329 | 1676 |
| Fibrobacter | Ascusb_16330 | 1677 |
| Paenibacillus | Ascusb_16336 | 1678 |
| Brevundimonas | Ascusb_16345 | 1679 |
| Desulfovibrio | Ascusb_16373 | 1680 |
| Clostridium_XI | Ascusb_16374 | 1681 |
| Helicobacter | Ascusb_16383 | 1682 |
| Prevotella | Ascusb_16420 | 1683 |
| Clostridium_XlVa | Ascusb_16423 | 1684 |
| Prevotella | Ascusb_16436 | 1685 |
| Herbiconiux | Ascusb_16453 | 1686 |
| Clostridium_IV | Ascusb_16461 | 1687 |
| Rikenella | Ascusb_16470 | 1688 |
| Clostridium_XlVa | Ascusb_16473 | 1689 |
| Hippea | Ascusb_16536 | 1690 |
| Lactobacillus | Ascusb_16537 | 1691 |
| Eubacterium | Ascusb_16541 | 1692 |
| Clostridium_IV | Ascusb_16546 | 1693 |
| Clostridium_III | Ascusb_16560 | 1694 |
| Lactobacillus | Ascusb_16565 | 1695 |
| Lactobacillus | Ascusb_16574 | 1696 |
| Desulfotomaculum | Ascusb_16578 | 1697 |
| Prevotella | Ascusb_16618 | 1698 |
| Staphylococcus | Ascusb_16628 | 1699 |
| Tenacibaculum | Ascusb_16632 | 1700 |
| Parabacteroides | Ascusb_16655 | 1701 |
| Clostridium_XlVa | Ascusb_16668 | 1702 |
| Clostridium_IV | Ascusb_16671 | 1703 |
| Clostridium_IV | Ascusb_16674 | 1704 |
| Pedobacter | Ascusb_16682 | 1705 |
| Helicobacter | Ascusb_16686 | 1706 |
| Proteiniclasticum | Ascusb_16691 | 1707 |
| Anaplasma | Ascusb_16711 | 1708 |
| Bacteroides | Ascusb_16734 | 1709 |
| Clostridium_IV | Ascusb_16749 | 1710 |
| Mucilaginibacter | Ascusb_16803 | 1711 |
| Verrucomicrobia | Ascusb_16829 | 1712 |
| Selenomonas | Ascusb_16884 | 1713 |
| Parabacteroides | Ascusb_16931 | 1714 |
| Eubacterium | Ascusb_16933 | 1715 |
| Coprococcus | Ascusb_16948 | 1716 |
| Weissella | Ascusb_16968 | 1717 |
| Pedobacter | Ascusb_16992 | 1718 |
| Clostridium_XI | Ascusb_16995 | 1719 |
| Sphingomonas | Ascusb_16998 | 1720 |
| Treponema | Ascusb_17013 | 1721 |
| Geobacter | Ascusb_17017 | 1722 |
| Clostridium_XlVa | Ascusb_17018 | 1723 |
| Filomicrobium | Ascusb_17036 | 1724 |
| Prevotella | Ascusb_17038 | 1725 |
| Pedobacter | Ascusb_17057 | 1726 |
| Pedobacter | Ascusb_17058 | 1727 |
| Clostridium_XlVa | Ascusb_17064 | 1728 |
| Bifidobacterium | Ascusb_17066 | 1729 |
| Saccharofermentans | Ascusb_17092 | 1730 |
| Ruminococcus | Ascusb_17136 | 1731 |
| Flavobacterium | Ascusb_17138 | 1732 |
| Rhodopirellula | Ascusb_17161 | 1733 |
| Roseburia | Ascusb_17171 | 1734 |
| Prevotella | Ascusb_17177 | 1735 |
| Limibacter | Ascusb_17182 | 1736 |
| Saccharofermentans | Ascusb_17203 | 1737 |
| Clostridium_{—}sensu_{—}stricto | Ascusb_17206 | 1738 |
| Clostridium_III | Ascusb_17243 | 1739 |
| Prevotella | Ascusb_17275 | 1740 |
| Pseudoxanthomonas | Ascusb_17283 | 1741 |
| Anaerorhabdus | Ascusb_17325 | 1742 |
| Clostridium_III | Ascusb_17360 | 1743 |
| Streptomyces | Ascusb_17372 | 1744 |
| Pedobacter | Ascusb_17388 | 1745 |
| Cellulomonas | Ascusb_17414 | 1746 |
| Clostridium_XlVa | Ascusb_17416 | 1747 |
| Olivibacter | Ascusb_17425 | 1748 |
| Treponema | Ascusb_17433 | 1749 |
| Gelidibacter | Ascusb_17437 | 1750 |
| Ruminococcus | Ascusb_17439 | 1751 |
| Clostridium_IV | Ascusb_17446 | 1752 |
| Gemmatimonas | Ascusb_17450 | 1753 |
| Prevotella | Ascusb_17459 | 1754 |
| Ethanoligenens | Ascusb_17477 | 1755 |
| Leucobacter | Ascusb_17494 | 1756 |
| Clostridium_XlVa | Ascusb_17502 | 1757 |
| Clostridium_XlVa | Ascusb_17507 | 1758 |
| Eggerthella | Ascusb_17540 | 1759 |
| Prevotella | Ascusb_17553 | 1760 |
| Prevotella | Ascusb_17569 | 1761 |
| Solobacterium | Ascusb_17571 | 1762 |
| Xanthobacter | Ascusb_17581 | 1763 |
| Verrucomicrobia | Ascusb_17649 | 1764 |
| Desulfovibrio | Ascusb_17670 | 1765 |
| Microbacterium | Ascusb_17717 | 1766 |
| Oscillibacter | Ascusb_17718 | 1767 |
| Blautia | Ascusb_17735 | 1768 |
| Papillibacter | Ascusb_17736 | 1769 |
| Prevotella | Ascusb_17759 | 1770 |
| Lentisphaera | Ascusb_17766 | 1771 |
| Ruminococcus | Ascusb_17767 | 1772 |
| Bacteroides | Ascusb_17769 | 1773 |
| Catonella | Ascusb_17771 | 1774 |
| Clostridium_XlVa | Ascusb_17773 | 1775 |
| Clostridium_IV | Ascusb_17782 | 1776 |
| Verrucomicrobia | Ascusb_17802 | 1777 |
| Clostridium_XI | Ascusb_17804 | 1778 |
| Prevotella | Ascusb_17810 | 1779 |
| Candidate phylum TM7 | Ascusb_17824 | 1780 |
| Mogibacterium | Ascusb_17838 | 1781 |
| Clostridium_XlVa | Ascusb_17846 | 1782 |
| Ruminococcus | Ascusb_17857 | 1783 |
| Eubacterium | Ascusb_17866 | 1784 |
| Clostridium_IV | Ascusb_17892 | 1785 |
| Rhodomicrobium | Ascusb_17896 | 1786 |
| Butyricicoccus | Ascusb_17957 | 1787 |
| Saccharofermentans | Ascusb_17975 | 1788 |
| Prevotella | Ascusb_17978 | 1789 |
| Mannheimia | Ascusb_17981 | 1790 |
| Lactobacillus | Ascusb_18078 | 1791 |
| Clostridium_IV | Ascusb_18081 | 1792 |
| Clostridium_IV | Ascusb_18091 | 1793 |
| Adlercreutzia | Ascusb_18107 | 1794 |
| Selenomonas | Ascusb_18110 | 1795 |
| Paenibacillus | Ascusb_18123 | 1796 |
| Clostridium_IV | Ascusb_18140 | 1797 |
| Paenibacillus | Ascusb_18148 | 1798 |
| Butyricimonas | Ascusb_18161 | 1799 |
| Wandonia | Ascusb_18170 | 1800 |
| Puniceicoccus | Ascusb_18179 | 1801 |
| Lactonifactor | Ascusb_18183 | 1802 |
| Selenomonas | Ascusb_18248 | 1803 |
| Brevundimonas | Ascusb_18262 | 1804 |
| Prevotella | Ascusb_18273 | 1805 |
| Gelidibacter | Ascusb_18283 | 1806 |
| Mogibacterium | Ascusb_18287 | 1807 |
| Clostridium_XlVa | Ascusb_18303 | 1808 |
| Coprococcus | Ascusb_18329 | 1809 |
| Verrucomicrobia | Ascusb_18335 | 1810 |
| Barnesiella | Ascusb_18339 | 1811 |
| Verrucomicrobia | Ascusb_18351 | 1812 |
| Clostridium_XlVa | Ascusb_18354 | 1813 |
| Anaerovorax | Ascusb_18371 | 1814 |
| Bacteroides | Ascusb_18389 | 1815 |
| Parasporobacterium | Ascusb_18444 | 1816 |
| Prevotella | Ascusb_18449 | 1817 |
| Parapedobacter | Ascusb_18475 | 1818 |
| Streptomyces | Ascusb_18495 | 1819 |
| Candidate phylum TM7 | Ascusb_18503 | 1820 |
| Thermotalea | Ascusb_18516 | 1821 |
| Alkaliflexus | Ascusb_18519 | 1822 |
| Oscillibacter | Ascusb_18557 | 1823 |
| Anaerotruncus | Ascusb_18564 | 1824 |
| Spirochaeta | Ascusb_18566 | 1825 |
| Clostridium_XI | Ascusb_18567 | 1826 |
| Sporotomaculum | Ascusb_18585 | 1827 |
| Sporacetigenium | Ascusb_18592 | 1828 |
| Bulleidia | Ascusb_18608 | 1829 |
| Clostridium_IV | Ascusb_18636 | 1830 |
| Syntrophomonas | Ascusb_18648 | 1831 |
| Desulfatiferula | Ascusb_18678 | 1832 |
| Hydrogenoanaerobacterium | Ascusb_18680 | 1833 |
| Clostridium_XlVa | Ascusb_18695 | 1834 |
| Mogibacterium | Ascusb_18731 | 1835 |
| Spirochaeta | Ascusb_18733 | 1836 |
| Prevotella | Ascusb_18735 | 1837 |
| Treponema | Ascusb_18738 | 1838 |
| Spiroplasma | Ascusb_18764 | 1839 |
| Clostridium_XlVa | Ascusb_18766 | 1840 |
| Bacteroides | Ascusb_18795 | 1841 |
| Treponema | Ascusb_18814 | 1842 |
| Selenomonas | Ascusb_18829 | 1843 |
| Butyricicoccus | Ascusb_18846 | 1844 |
| Gelidibacter | Ascusb_18866 | 1845 |
| Acetitomaculum | Ascusb_18876 | 1846 |
| Proteiniclasticum | Ascusb_18907 | 1847 |
| Papillibacter | Ascusb_18930 | 1848 |
| Prevotella | Ascusb_18949 | 1849 |
| Elusimicrobium | Ascusb_18970 | 1850 |
| Lachnospiracea_incertae_sedis | Ascusb_18998 | 1851 |
| Devosia | Ascusb_19006 | 1852 |
| Roseburia | Ascusb_19052 | 1853 |
| Mucilaginibacter | Ascusb_19054 | 1854 |
| Mogibacterium | Ascusb_19056 | 1855 |
| Saccharofermentans | Ascusb_19063 | 1856 |
| Paenibacillus | Ascusb_19092 | 1857 |
| Anaerotruncus | Ascusb_19101 | 1858 |
| Leucobacter | Ascusb_19114 | 1859 |
| Clostridium_XlVa | Ascusb_19148 | 1860 |
| Eubacterium | Ascusb_19160 | 1861 |
| Beijerinckia | Ascusb_19170 | 1862 |
| Prevotella | Ascusb_19200 | 1863 |
| Clostridium_III | Ascusb_19206 | 1864 |
| Cyanobacteria | Ascusb_19219 | 1865 |
| Pseudoflavonifractor | Ascusb_19237 | 1866 |
| Butyrivibrio | Ascusb_19245 | 1867 |
| Acholeplasma | Ascusb_19267 | 1868 |
| Filomicrobium | Ascusb_19288 | 1869 |
| Clostridium_III | Ascusb_19335 | 1870 |
| Pseudoflavonifractor | Ascusb_19340 | 1871 |
| Anaerophaga | Ascusb_19341 | 1872 |
| Lachnospiracea_incertae_sedis | Ascusb_19347 | 1873 |
| Asaccharobacter | Ascusb_19353 | 1874 |
| Kordia | Ascusb_19371 | 1875 |
| Ruminococcus | Ascusb_19376 | 1876 |
| Clostridium_III | Ascusb_19379 | 1877 |
| Ethanoligenens | Ascusb_19392 | 1878 |
| Clostridium_XlVa | Ascusb_19412 | 1879 |
| Barnesiella | Ascusb_19414 | 1880 |
| Eubacterium | Ascusb_19444 | 1881 |
| Prevotella | Ascusb_19457 | 1882 |
| Anaerophaga | Ascusb_19496 | 1883 |
| Acetitomaculum | Ascusb_19498 | 1884 |
| Prevotella | Ascusb_19503 | 1885 |
| Clostridium_III | Ascusb_19507 | 1886 |
| Marinoscillum | Ascusb_19558 | 1887 |
| Pedobacter | Ascusb_19568 | 1888 |
| Prevotella | Ascusb_19579 | 1889 |
| Prevotella | Ascusb_19613 | 1890 |
| Anaerovorax | Ascusb_19633 | 1891 |
| Clostridium_XlVa | Ascusb_19658 | 1892 |
| Clostridium_IV | Ascusb_19662 | 1893 |
| Lachnospiracea_incertae_sedis | Ascusb_19681 | 1894 |
| Clostridium_{—}sensu_{—}stricto | Ascusb_19694 | 1895 |
| Lishizhenia | Ascusb_19698 | 1896 |
| Pedobacter | Ascusb_19700 | 1897 |
| Howardella | Ascusb_19731 | 1898 |
| Roseburia | Ascusb_19745 | 1899 |
| Clostridium_XlVa | Ascusb_19754 | 1900 |
| Anaerovorax | Ascusb_19765 | 1901 |
| Lentisphaera | Ascusb_19772 | 1902 |
| Prevotella | Ascusb_19778 | 1903 |
| Saccharofermentans | Ascusb_19779 | 1904 |
| Cyanobacteria | Ascusb_19818 | 1905 |
| Proteiniphilum | Ascusb_19824 | 1906 |
| Schwartzia | Ascusb_19855 | 1907 |
| Anaerorhabdus | Ascusb_19884 | 1908 |
| Robinsoniella | Ascusb_19885 | 1909 |
| Clostridium_IV | Ascusb_19904 | 1910 |
| Erysipelotrichaceae_incertae_sedis | Ascusb_19936 | 1911 |
| Flavobacterium | Ascusb_19950 | 1912 |
| Pedobacter | Ascusb_19955 | 1913 |
| Clostridium_III | Ascusb_19982 | 1914 |
| Selenomonas | Ascusb_20001 | 1915 |
| Rhizobium | Ascusb_20027 | 1916 |
| Victivallis | Ascusb_20044 | 1917 |
| Butyricimonas | Ascusb_20062 | 1918 |
| Parabacteroides | Ascusb_20064 | 1919 |
| Adhaeribacter | Ascusb_20067 | 1920 |
| Eubacterium | Ascusb_20086 | 1921 |
| Acidobacteria | Ascusb_20100 | 1922 |
| Treponema | Ascusb_20104 | 1923 |
| Clostridium_XlVa | Ascusb_20108 | 1924 |
| Clostridium_XlVa | Ascusb_20135 | 1925 |
| Schwartzia | Ascusb_20143 | 1926 |
| Prevotella | Ascusb_20162 | 1927 |
| Selenomonas | Ascusb_20172 | 1928 |
| Beijerinckia | Ascusb_20219 | 1929 |
| Eubacterium | Ascusb_20221 | 1930 |
| Adhaeribacter | Ascusb_20251 | 1931 |
| Verrucomicrobia | Ascusb_20264 | 1932 |
| Desulfobulbus | Ascusb_20275 | 1933 |
| Bacteroides | Ascusb_20278 | 1934 |
| Rummeliibacillus | Ascusb_20291 | 1935 |
| Agarivorans | Ascusb_20293 | 1936 |
| Clostridium_XlVa | Ascusb_20306 | 1937 |
| Selenomonas | Ascusb_20312 | 1938 |
| Verrucomicrobia | Ascusb_20365 | 1939 |
| Prevotella | Ascusb_20368 | 1940 |
| Spirochaeta | Ascusb_20392 | 1941 |
| Selenomonas | Ascusb_20405 | 1942 |
| Spiroplasma | Ascusb_20424 | 1943 |
| Pedobacter | Ascusb_20440 | 1944 |
| Clostridium_XlVa | Ascusb_20449 | 1945 |
| Cyanobacteria | Ascusb_20456 | 1946 |
| Lactobacillus | Ascusb_20463 | 1947 |
| Clostridium_XlVa | Ascusb_20529 | 1948 |
| Prevotella | Ascusb_20534 | 1949 |
| Prevotella | Ascusb_20540 | 1950 |
| Marinobacter | Ascusb_20569 | 1951 |
| Butyricimonas | Ascusb_20576 | 1952 |
| Prevotella | Ascusb_20594 | 1953 |
| Dongia | Ascusb_20595 | 1954 |
| Anaerovorax | Ascusb_20639 | 1955 |
| Butyricimonas | Ascusb_20757 | 1956 |
| Cryptanaerobacter | Ascusb_20826 | 1957 |
| Papillibacter | Ascusb_20904 | 1958 |
| Clostridium_{—}sensu_{—}stricto | Ascusb_20938 | 1959 |
| Escherichia/Shigella | Ascusb_20943 | 1960 |
| Butyricicoccus | Ascusb_20986 | 1961 |
| Prevotella | Ascusb_21013 | 1962 |
| Lachnospiracea_incertae_sedis | Ascusb_21027 | 1963 |
| Thermotalea | Ascusb_21035 | 1964 |
| Cohaesibacter | Ascusb_21042 | 1965 |
| Clostridium_XVIII | Ascusb_21043 | 1966 |
| Lachnospiracea_incertae_sedis | Ascusb_21085 | 1967 |
| Spirochaeta | Ascusb_21095 | 1968 |
| Clostridium_XlVa | Ascusb_21112 | 1969 |
| Hydrogenoanaerobacterium | Ascusb_21147 | 1970 |
| Clostridium_IV | Ascusb_21151 | 1971 |
| Papillibacter | Ascusb_21160 | 1972 |
| Sporosarcina | Ascusb_21190 | 1973 |
| Selenomonas | Ascusb_21219 | 1974 |
| Papillibacter | Ascusb_21229 | 1975 |
| Lachnospiracea_incertae_sedis | Ascusb_21244 | 1976 |
| Clostridium_XlVa | Ascusb_21271 | 1977 |
| Saccharofermentans | Ascusb_21297 | 1978 |
| Clostridium_IV | Ascusb_21309 | 1979 |
| Lachnospiracea_incertae_sedis | Ascusb_21348 | 1980 |
| Clostridium_IV | Ascusb_21425 | 1981 |
| Lachnospiracea_incertae_sedis | Ascusb_21436 | 1982 |
| Desulfotomaculum | Ascusb_21466 | 1983 |
| Pedobacter | Ascusb_21484 | 1984 |
| Anaeroplasma | Ascusb_21546 | 1985 |
| Clostridium_IV | Ascusb_21585 | 1986 |
| Treponema | Ascusb_21595 | 1987 |
| Mogibacterium | Ascusb_21601 | 1988 |

TABLE 14
Microbes of the present disclosure

| Strain | | | Percent | | | Sequence |
|---|---|---|---|---|---|---|
| Designation | Deposit No. | Parent | Match | MIC | Predicted Taxa of Isolated Microbes | Identifier |
| Ascusb_579A | 202203086 | Ascusb_579 | 99.1 | 0.57203 | d: Bacteria(1.0000), p: “Bacteroidetes”(1.0000), c: “Bacteroidia”(1.0000), | 4033 |
| | | | | | o: “Bacteroidales”(1.0000), f: “Prevotellaceae”(0.9700), g: Prevotella(0.9409), | |
| | | | | | s: Prevotella_{—}brevis(0.6963) | |
| Ascusb_2295A | 202203087 | Ascusb_2295 | 97.3 | 0.58602 | d: Bacteria(1.0000), p: “Bacteroidetes”(1.0000), c: “Bacteroidia”(1.0000), | 4034 |
| | | | | | o: “Bacteroidales”(1.0000), f: “Prevotellaceae”(0.9900), g: Prevotella(0.9801), | |
| | | | | | s: Prevotella_{—}brevis(0.9507) | |
| Ascusb_2143B | 202203087 | Ascusb_2143 | 99.1 | 0.46995 | d: Bacteria(1.0000), p: “Bacteroidetes”(1.0000), c: “Bacteroidia”(1.0000), | 4035 |
| | | | | | o: “Bacteroidales”(1.0000), f: “Prevotellaceae”(0.9900), g: Prevotella(0.9801), | |
| | | | | | s: Prevotella_{—}brevis(0.9703) | |
| Ascusb_124A | 202203087 | Ascusb_124 | 99.1 | 0.56682 | d: Bacteria(1.0000), p: “Bacteroidetes”(0.9900), c: “Bacteroidia”(0.9801), | 4036 |
| | | | | | o: “Bacteroidales”(0.9703), f: Bacteroidaceae(0.5628), g: Bacteroides(0.3264) | |
| Ascusb_3851B | 202203087 | Ascusb_3851 | 97.8 | 0.60351 | d: Bacteria(1.0000), p: “Bacteroidetes”(0.9800), c: “Bacteroidia”(0.9310), | 4037 |
| | | | | | o: “Bacteroidales”(0.8844), f: Bacteroidaceae(0.5572), g: Bacteroides(0.3510), | |
| | | | | | s: Bacteroides_{—}rodentium(0.0456) | |
| Ascusb_7126A | 202203087 | Ascusb_7126 | 100 | 0.53092 | d: Bacteria(1.0000), p: “Synergistetes”(0.1100), c: Synergistia(0.0121), | 4038 |
| | | | | | o: Synergistales(0.0013), f: Synergistaceae(0.0001), g: Aminiphilus(0.0000), | |
| | | | | | s: Aminiphilus_{—}circumscriptus(0.0000) | |
| Ascusb_2255B | 202203087 | Ascusb_2255 | 100 | 0.65925 | d: Bacteria(1.0000), p: “Bacteroidetes”(1.0000), c: “Bacteroidia”(1.0000), | 4039 |
| | | | | | o: “Bacteroidales”(1.0000), f: Bacteroidaceae(0.6700), g: Bacteroides(0.4489), | |
| | | | | | s: Bacteroides_{—}plebeius(0.2155) | |
| Ascusb_845A | 202203087 | Ascusb_845 | 99.6 | 0.63318 | d: Bacteria(1.0000), p: “Bacteroidetes”(0.8000), c: “Bacteroidia”(0.3040), | 4040 |
| | | | | | o: “Bacteroidales”(0.1155), f: “Porphyromonadaceae”(0.0196), g: Tannerella(0.0016), | |
| | | | | | s: Tannerella_{—}forsythia(0.0001) | |
| Ascusb_223B | 202203087 | Ascusb_223 | 97.8 | 0.49 | d: Bacteria(1.0000), p: “Bacteroidetes”(0.9900), c: “Bacteroidia”(0.9801), | 4041 |
| | | | | | o: “Bacteroidales”(0.9703), f: “Prevotellaceae”(0.9606), g: Prevotella(0.9510), | |
| | | | | | s: Prevotella_{—}brevis(0.9415) | |
| Ascusb_15705A | 202203087 | Ascusb_15705 | 99.6 | 0.62634 | d: Bacteria(1.0000), p: “Proteobacteria”(0.2900), c: Alphaproteobacteria(0.0696), | 4042 |
| | | | | | o: Sphingomonadales(0.0153), f: Sphingomonadaceae(0.0031), g: Sphingomonas(0.0004), | |
| | | | | | s: Sphingomonas_{—}mucosissima(0.0000) | |
| Ascusb_9859A | 202203087 | Ascusb_9859 | 98.2 | 0.6419 | d: Bacteria(1.0000), p: “Proteobacteria”(0.3300), c: Alphaproteobacteria(0.0825), | 4043 |
| | | | | | o: Sphingomonadales(0.0190), f: Sphingomonadaceae(0.0040), g: Sphingomonas(0.0006), | |
| | | | | | s: Sphingomonas_{—}mucosissima(0.0001) | |
| Ascusb_12147A | 202203087 | Ascusb_12147 | 98.2 | 0.59829 | d: Bacteria(1.0000), p: “Proteobacteria”(0.3000), c: Alphaproteobacteria(0.0720), | 4044 |
| | | | | | o: Sphingomonadales(0.0166), f: Sphingomonadaceae(0.0035), g: Sphingomonas(0.0004), | |
| | | | | | s: Sphingomonas_{—}mucosissima(0.0000) | |
| Ascusb_9658A | 202203087 | Ascusb_9658 | 97.3 | 0.70988 | d: Bacteria(1.0000), p: “Acidobacteria”(0.1200), c: Acidobacteria_Gp4(0.0108), g: Aridibacter(0.0010), | 4045 |
| | | | | | s: Aridibacter_{—}kavangonensis(0.0001) | |
| Ascusb_17947C | 202203087 | Ascusb_17947 | 99.1 | 0.5943 | d: Bacteria(1.0000), p: “Bacteroidetes”(1.0000), c: “Bacteroidia”(0.9900), | 4046 |
| | | | | | o: “Bacteroidales”(0.9801), f: “Prevotellaceae”(09703), g: Prevotella(0.9606), | |
| | | | | | s: Prevotella_{—}copri(0.3938) | |
| Ascusb_21C | 202203087 | Ascusb_21 | 98.7 | 0.76005 | d: Bacteria(1.0000), p: “Bacteroidetes”(1.0000), c: “Bacteroidia”(1.0000), | 4047 |
| | | | | | o: “Bacteroidales”(1.0000), f: “Prevotellaceae”(1.0000), g: Prevotella(1.0000), | |
| | | | | | s: Prevotellacopri(0.3600) | |
| Ascusb_1379A | 202203087 | Ascusb_1379 | 99.6 | 0.56455 | d: Bacteria(1.0000), p: “Bacteroidetes”(1.0000), c: “Bacteroidia”(0.9900), | 4048 |
| | | | | | o: “Bacteroidales”(0.9801), f: “Prevotellaceae”(0.8821), g: Prevotella(0.7939), | |
| | | | | | s: Prevotella_{—}brevis(0.6351) | |
| Ascusb_11080B | 202203087 | Ascusb_11080 | 100 | 0.58682 | d: Bacteria(1.0000), p: “Tenericutes”(0.3200), c: Mollicutes(01024), | 4049 |
| | | | | | o: Entomoplasmatales(0.0276), f: Spiroplasmataceae(0.0072), g: Spiroplasma(0.0019), | |
| | | | | | s: Spiroplasma_{—}culicicola(0.0001) | |
| Ascusb_1411A | 202203087 | Ascusb_1411 | 99.6 | 0.50134 | d: Bacteria(1.0000), p: “Bacteroidetes”(0.9400), c: “Bacteroidia”(0.8272), | 4050 |
| | | | | | o: “Bacteroidales”(0.7279), f: “Prevotellaceae”(0.5168), g: Prevotella(0.3463), | |
| | | | | | s: Prevotella_{—}stercorea(0.0900) | |
| Ascusb_3855A | 202203087 | Ascusb_3855 | 99.6 | 0.66021 | d: Bacteria(1.0000), p: “Bacteroidetes”(1.0000), c: “Bacteroidia”(0.9200), | 4051 |
| | | | | | o: “Bacteroidales”(0.8464), f: “Prevotellaceae”(04317), g: Prevotella(0.2201), | |
| | | | | | s: Prevotella_{—}bryantii(0.0506) | |
| Ascusb_4938A | 202203087 | Ascusb_4938 | 99.6 | 0.54788 | d: Bacteria(1.0000), p: “Bacteroidetes”(1.0000), c: “Bacteroidia”(0.9600), | 4052 |
| | | | | | o: “Bacteroidales”(0.9216), f: Bacteroidaceae(0.8755), g: Bacteroides(0.8317), | |
| | | | | | s: Bacteroides_{—}plebeius(0.2745) | |
| Ascusb_4492C | 202203087 | Ascusb_4492 | 97.3 | 0.48777 | d: Bacteria(1.0000), p: “Tenericutes”(1.0000), c: Mollicutes(1.0000), | 4053 |
| | | | | | o: Anaeroplasmatales(1.0000), f: Anaeroplasmataceae(1.0000), g: Anaeroplasma(1.0000), | |
| | | | | | s: Anaeroplasma_{—}bactoclasticum(0.7400) | |
| Ascusb_2612C | 202203087 | Ascusb_2612 | 97.3 | 0.54579 | d: Bacteria(1.0000), p: “Tenericutes”(1.0000), c: Mollicutes(1.0000), | 4054 |
| | | | | | o: Anaeroplasmatales(1.0000), f: Anaeroplasmataceae(1.0000), g: Anaeroplasma(1.0000), | |
| | | | | | s: Anaeroplasma_{—}bactoclasticum(0.6200) | |
| Ascusb_445B | 202203087 | Ascusb_445 | 98.7 | 0.5471 | d: Bacteria(1.0000), p: “Bacteroidetes”(1.0000), c: “Bacteroidia”(1.0000), | 4055 |
| | | | | | o: “Bacteroidales”(1.0000), f: “Prevotellaceae”(1.0000), g: Prevotella(1.0000), | |
| | | | | | s: Prevotella_{—}ruminicola(0.8700) | |
| Ascusb_1590A | 202203087 | Ascusb_1590 | 99.1 | 0.58446 | d: Bacteria(1.0000), p: Firmicutes(0.8200), c: Clostridia(0.5658), | 4056 |
| | | | | | o: Clostridiales(0.3904), f: Ruminococcaceae(0.1640), g: Oscillibacter(0.0312), | |
| | | | | | s: Oscillibacter_{—}valericigenes(0.0056) | |
| Ascusb_386B | 202203087 | Ascusb_386 | 99.6 | 0.60942 | d: Bacteria(1.0000), p: “Bacteroidetes”(0.9900), c: “Bacteroidia”(0.3564), | 4057 |
| | | | | | o: “Bacteroidales”(0.1283), f: “Rikenellaceae”(0.0205), g: Alistipes(0.0033), | |
| | | | | | s: Alistipes_{—}finegoldii(0.0003) | |
| Ascusb_1419B | 202203087 | Ascusb_1419 | 99.6 | 0.57852 | d: Bacteria(1.0000), p: “Bacteroidetes”(0.9900), c: “Bacteroidia”(0.3366), | 4058 |
| | | | | | o: “Bacteroidales”(0.1144), f: “Rikenellaceae”(0.0160), g: Alistipes(0.0021), | |
| | | | | | s: Alistipes_{—}finegoldii(0.0002) | |
| Ascusb_221B | 202203087 | Ascusb_221 | 100 | 0.60333 | d: Bacteria(1.0000), p: “Bacteroidetes”(1.0000), c: “Bacteroidia”(1.0000), | 4059 |
| | | | | | o: “Bacteroidales”(1.0000), f: “Prevotellaceae”(0.6200), g: Prevotella(0.3844), | |
| | | | | | s: Prevotella_{—}ruminicola(0.2114) | |
| Ascusb_847B | 202203087 | Ascusb_847 | 98.2 | 0.67727 | d: Bacteria(1.0000), p: Firmicutes(0.9100), c: Clostridia(0.8190), | 4060 |
| | | | | | o: Clostridiales(0.7371), f: Lachnospiraceae(0.6339), g: Clostridium_XIVa(0.3106), | |
| | | | | | s: Clostridium_{—}fimetarium(0.1180) | |
| Ascusb_466B | 202203087 | Ascusb_466 | 99.6 | 0.81206 | d: Bacteria(1.0000), p: Candidatus_Saccharibacteria(0.9600), | 4061 |
| | | | | | g: Saccharibacteria_{—}genera_{—}incertae_{—}sedis(0.9216) | |
| Ascusb_6214A | 202203087 | Ascusb_6214 | 98.7 | 0.57862 | d: Bacteria(1.0000), p: “Deferribacteres”(0.0800), c: Deferribacteres(0.0064), | 4062 |
| | | | | | o: Deferribacterales(0.0005), f: Deferribacteraceae(0.0000), g: Deferribacter(0.0000), | |
| | | | | | s: Deferribacter_{—}thermophilus(0.0000) | |
| Ascusb_4975B | 202203087 | Ascusb_4975 | 97.8 | 0.62611 | d: Bacteria(1.0000), p: “Proteobacteria”(0.9000), c: Alphaproteobacteria(0.7470), | 4063 |
| | | | | | o: Rhizobiales(0.5229), f: Hyphomicrobiaceae(0.1516), g: Devosia(0.0227), | |
| | | | | | s: Devosia_{—}neptuniae(0.0032) | |
| Ascusb_3349B | 202203087 | Ascusb_3349 | 97.3 | 0.49172 | d: Bacteria(1.0000), p: Firmicutes(0.9100), c: Bacilli(0.7098), | 4064 |
| | | | | | o: Bacillales(0.3691), f: Paenibacillaceae_1(0.1218), g: Paenibacillus(0.0317), | |
| | | | | | s: Paenibacillusmendelii(0.0022) | |
| Ascusb_7502A | 202203087 | Ascusb_7502 | 100 | 0.46488 | d: Bacteria(1.0000), p: “Bacteroidetes”(1.0000), c: “Bacteroidia”(0.9900), | 4065 |
| | | | | | o: “Bacteroidales”(0.9801), f: Bacteroidaceae(0.9605), g: Bacteroides(0.9413) | |
| Ascusb_352B | 202203087 | Ascusb_352 | 99.6 | 0.74315 | d: Bacteria(1.0000), p: “Armatimonadetes”(0.1000), | 4066 |
| | | | | | g: Armatimonadetes_gp4(0.0080) | |
| Ascusb_262A | 202203087 | Ascusb_262 | 99.1 | 0.5299 | d: Bacteria(1.0000), p: Firmicutes(0.8100), c: Clostridia(0.5994), | 4067 |
| | | | | | o: Clostridiales(0.4376), f: Ruminococcaceae(0.2013), g: Hydrogenoanaerobacterium(0.0543), | |
| | | | | | s: Hydrogenoanaerobacterium_{—}saccharovorans(0.0147) | |
| Ascusb_314A | 202203087 | Ascusb_314 | 99.1 | 0.58112 | d: Bacteria(1.0000), p: Firmicutes(0.9700), c: Clostridia(0.9409), | 4068 |
| | | | | | o: Clostridiales(0.9127), f: Clostridiales_Incertae_Sedis_XIII(0.8397), g: Anaerovorax(0.5206), | |
| | | | | | s: Anaerovorax_{—}odorimutans(0.3228) | |
| Ascusb_4791B | 202203087 | Ascusb_4791 | 99.6 | 0.48818 | d: Bacteria(1.0000), p: Firmicutes(0.5300), c: Clostridia(0.2332), | 4069 |
| | | | | | o: Clostridiales(0.1003), f: Ruminococcaceae(0.0321), g: Hydrogenoanaerobacterium(0.0087), | |
| | | | | | s: Hydrogenoanaerobacterium_{—}saccharovorans(0.0023) | |
| Ascusb_479A | 202203087 | Ascusb_479 | 99.6 | 0.79331 | d: Bacteria(1.0000), p: Firmicutes(0.9500), c: Clostridia(0.8930), | 4070 |
| | | | | | o: Clostridiales(0.8394), f: Lachnospiraceae(0.6967), g: Lachnospiracea_{—}incertae_{—}sedis(0.2578), | |
| | | | | | s: Eubacterium_{—}ruminantium(0.0696) | |
| Ascusb_2965B | 202203087 | Ascusb_2965 | 100 | 0.45774 | d: Bacteria(1.0000), p: “Bacteroidetes”(0.9900), c: Flavobacteriia(0.5148), | 4071 |
| | | | | | o: “Flavobacteriales”(0.2677), f: Flavobacteriaceae(0.1205), g: Lutibacter(0.0169), | |
| | | | | | s: Lutibacter_{—}flavus(0.0024) | |
| Ascusb_141B | 202203087 | Ascusb_141 | 100 | 0.57563 | d: Bacteria(1.0000), p: Firmicutes(0.9900), c: Clostridia(0.9801), | 4072 |
| | | | | | o: Clostridiales(0.9605), f: Ruminococcaceae(0.9413), g: Ruminococcus(0.8942), | |
| | | | | | s: Ruminococcus_{—}flavefaciens(0.8495) | |
| Ascusb_110A | 202203087 | Ascusb_110 | 100 | 0.47156 | d: Bacteria(1.0000), p: Firmicutes(0.9800), c: Clostridia(0.9310), | 4073 |
| | | | | | o: Clostridiales(0.8844), f: Lachnospiraceae(0.6545), g: Blautia(0.2618), | |
| | | | | | s: Blautia_{—}hansenii(0.0890) | |
| Ascusb_3013B | 202203087 | Ascusb_3013 | 100 | 0.47875 | d: Bacteria(1.0000), p: “Bacteroidetes”(0.9800), c: “Bacteroidia”(0.9212), | 4074 |
| | | | | | o: “Bacteroidales”(0.8659), f: “Prevotellaceae”(05455), g: Prevotella(0.3437), | |
| | | | | | s: Prevotellashahii(0.0894) | |
| Ascusb_8516A | 202203087 | Ascusb_8516 | 99.6 | 0.54426 | d: Bacteria(1.0000), p: “Tenericutes”(0.2600), c: Mollicutes(0.0676), | 4075 |
| | | | | | o: Entomoplasmatales(0.0128), f: Spiroplasmataceae(0.0023), g: Spiroplasma(0.0004), | |
| | | | | | s: Spiroplasma_{—}taiwanense(0.0000) | |
| Ascusb_714A | 202203087 | Ascusb_714 | 99.6 | 0.48893 | d: Bacteria(1.0000), p: Firmicutes(0.7900), c: Clostridia(0.5135), | 4076 |
| | | | | | o: Clostridiales(0.3338), f: Ruminococcaceae(0.0968), g: Clostridium_III(0.0155), | |
| | | | | | s: Clostridiumtermitidis(0.0012) | |
| Ascusb_1784B | 202203087 | Ascusb_1784 | 99.6 | 0.60865 | d: Bacteria(1.0000), p: “Bacteroidetes”(1.0000), c: “Bacteroidia”(0.9800), | 4077 |
| | | | | | o: “Bacteroidales”(0.9604), f: Bacteroidaceae(0.9316), g: Bacteroides(0.9036), | |
| | | | | | s: Bacteroides_{—}coprocola(0.3976) | |
| Ascusb_3047B | 202203087 | Ascusb_3047 | 99.1 | 0.50948 | d: Bacteria(1.0000), p: “Bacteroidetes”(1.0000), c: “Bacteroidia”(0.9600), | 4078 |
| | | | | | o: “Bacteroidales”(0.9216), f: Bacteroidaceae(0.8755), g: Bacteroides(0.8317), | |
| | | | | | s: Bacteroides_{—}coprocola(0.3660) | |
| Ascusb_2140A | 202203087 | Ascusb_2140 | 97.3 | 0.58186 | d: Bacteria(1.0000), p: “Bacteroidetes”(0.9900), c: “Bacteroidia”(0.9306), | 4079 |
| | | | | | o: “Bacteroidales”(0.8748), f: Bacteroidaceae(0.8135), g: Bacteroides(0.7566), | |
| | | | | | s: Bacteroides_{—}barnesiae(0.1740) | |
| Ascusb_2917A | 202203087 | Ascusb_2917 | 99.1 | 0.48058 | d: Bacteria(1.0000), p: Firmicutes(0.8000), c: Erysipelotrichia(0.4480), | 4080 |
| | | | | | o: Erysipelotrichales(0.2509), f: Erysipelotrichaceae(0.1405), g: Erysipelothrix(0.0604), | |
| | | | | | s: Erysipelothrix_{—}tonsillarum(0.0139) | |
| Ascusb_555A | 202203087 | Ascusb_555 | 97.8 | 0.60354 | d: Bacteria(1.0000), p: Firmicutes(0.6700), c: Erysipelotrichia(0.3015), | 4081 |
| | | | | | o: Erysipelotrichales(0.1357), f: Erysipelotrichaceae(0.0611), g: Erysipelothrix(0.0177), | |
| | | | | | s: Erysipelothrix_{—}rhusiopathiae(0.0027) | |
| Ascusb_1618B | 202203087 | Ascusb_1618 | 99.6 | 0.45987 | d: Bacteria(1.0000), p: Firmicutes(0.9600), c: Clostridia(0.9120), | 4082 |
| | | | | | o: Clostridiales(0.8664), f: Lachnospiraceae(0.7191), g: Clostridium_XIVa(0.2805), | |
| | | | | | s: Clostridium_{—}glycyrrhizinilyticum(0.0337) | |
| Ascusb_534B | 202203087 | Ascusb_534 | 100 | 0.55524 | d: Bacteria(1.0000), p: “Fibrobacteres”(1.0000), c: “Fibrobacteria”(1.0000), | 4083 |
| | | | | | o: “Fibrobacterales”(1.0000), f: “Fibrobacteraceae”(1.0000), g: Fibrobacter(1.0000), | |
| | | | | | s: Fibrobacter_{—}succinogenes_{—}subsp._{—}elongatus(0.9300) | |
| Ascusb_1179C | 202203087 | Ascusb_1179 | 98.2 | 0.57688 | d: Bacteria(1.0000), p: “Fibrobacteres”(1.0000), c: “Fibrobacteria”(1.0000), | 4084 |
| | | | | | o: “Fibrobacterales”(1.0000), f: “Fibrobacteraceae”(1.0000), g: Fibrobacter(1.0000), | |
| | | | | | s: Fibrobacter_{—}succinogenes_{—}subsp._{—}elongatus(0.8000) | |
| Ascusb_1536B | 202203087 | Ascusb_1536 | 100 | 0.54341 | d: Bacteria(1.0000), p: Firmicutes(0.6200), c: Clostridia(0.3534), | 4085 |
| | | | | | o: Clostridiales(0.1979), f: Ruminococcaceae(0.0594), g: Ruminococcus(0.0178), | |
| | | | | | s: Ruminococcus_{—}callidus(0.0039) | |
| Ascusb_132C | 202203087 | Ascusb_132 | 100 | 0.57452 | d: Bacteria(1.0000), p: “Bacteroidetes”(1.0000), c: “Bacteroidia”(0.9800), | 4086 |
| | | | | | o: “Bacteroidales”(0.9604), f: “Prevotellaceae”(0.7491), g: Prevotella(0.5768), | |
| | | | | | s: Prevotella_{—}brevis(0.2769) | |
| Ascusb_1278A | 202203087 | Ascusb_1278 | 99.6 | 0.58225 | d: Bacteria(1.0000), p: Firmicutes(0.9800), c: Erysipelotrichia(0.9310), | 4087 |
| | | | | | o: Erysipelotrichales(0.8844), f: Erysipelotrichaceae(0.8402), g: Faecalicoccus(0.7814) | |
| Ascusb_654A | 202203087 | Ascusb_654 | 99.6 | 0.77751 | d: Bacteria(1.0000), p: Firmicutes(0.8500), c: Clostridia(0.6035), | 4088 |
| | | | | | o: Clostridiales(0.4285), f: Lachnospiraceae(0.1714), g: Clostridium_XIVa(0.0309), | |
| | | | | | s: Clostridium_{—}polysaccharolyticum(0.0037) | |
| Ascusb_221C | 202203086 | Ascusb_221 | 98.7 | 0.60333 | d: Bacteria(1.0000), p: “Bacteroidetes”(1.0000), c: “Bacteroidia”(1.0000), | 4089 |
| | | | | | o: “Bacteroidales”(1.0000), f: “Prevotellaceae”(0.6200), g: Prevotella(0.3844), | |
| | | | | | s: Prevotella_{—}ruminicola(0.2114) | |
| Ascusb_2191C | 202203087 | Ascusb_2191 | 98.2 | 0.61282 | d: Bacteria(1.0000), p: Firmicutes(0.7500), c: Clostridia(0.4875), | 4090 |
| | | | | | o: Clostridiales(0.3120), f: Lachnospiraceae(0.1154), g: Clostridium_XIVa(0.0185), | |
| | | | | | s: Clostridium_{—}glycyrrhizinilyticum(0.0018) | |
| Ascusb_10267B | 202203086 | Ascusb_10267 | 99.6 | 0.66729 | d: Bacteria(1.0000), p: “Bacteroidetes”(0.9800), c: “Bacteroidia”(0.5292), | 4091 |
| | | | | | o: “Bacteroidales”(0.2858), f: “Porphyromonadaceae”(0.0743), g: Barnesiella(0.0082), | |
| | | | | | s: Barnesiella_{—}viscericola(0.0009) | |
| Ascusb_2897A | 202203086 | Ascusb_2897 | 97.3 | 0.64784 | d: Bacteria(1.0000), p: “Bacteroidetes”(1.0000), c: “Bacteroidia”(1.0000), | 4092 |
| | | | | | o: “Bacteroidales”(1.0000), f: “Prevotellaceae”(09400), g: Prevotella(0.8836), | |
| | | | | | s: Prevotella_{—}brevis(0.6804) | |
| Ascusb_19701A | 202203086 | Ascusb_19701 | 100 | 0.58328 | d: Bacteria(1.0000), p: “Proteobacteria”(1.0000), c: Gammaproteobacteria(0.9900), | 4093 |
| | | | | | o: Pasteurellales(0.5841), f: Pasteurellaceae(0.3446), g: Aggregatibacter(0.0689), | |
| | | | | | s: Aggregatibactersegnis(0.0138) | |
| Ascusb_9898B | 202203086 | Ascusb_9898 | 97.8 | 0.61448 | d: Bacteria(1.0000), p: “Bacteroidetes”(0.9700), c: Flavobacteriia(0.3977), | 4094 |
| | | | | | o: “Flavobacteriales”(0.1631), f: Flavobacteriaceae(0.0669), g: Sinomicrobium(0.0060), | |
| | | | | | s: Sinomicrobium_{—}pectinilyticum(0.0005) | |
| Ascusb_299B | 202203086 | Ascusb_299 | 99.6 | 0.89262 | d: Bacteria(1.0000), p: Candidatus_Saccharibacteria(0.9300), | 4095 |
| | | | | | g: Saccharibacteria_{—}genera_{—}incertae_{—}sedis(0.8649) | |
| Ascusb_346B | 202203086 | Ascusb_346 | 97.3 | 0.80981 | d: Bacteria(1.0000), p: Candidatus_Saccharibacteria(0.9500), | 4096 |
| | | | | | g: Saccharibacteria_{—}genera_{—}incertae_{—}sedis(0.9025) | |
| Ascusb_1271A | 202203086 | Ascusb_1271 | 99.1 | 0.57435 | d: Bacteria(1.0000), p: Firmicutes(0.9300), c: Clostridia(0.8649), | 4097 |
| | | | | | o: Clostridiales(0.8044), f: Lachnospiraceae(0.7400), g: Syntrophococcus(0.2664), | |
| | | | | | s: Syntrophococcus_{—}sucromutans(0.0959) | |
| Ascusb_3758C | 202203086 | Ascusb_3758 | 99.1 | 0.45884 | d: Bacteria(1.0000), p: “Bacteroidetes”(0.9800), c: “Bacteroidia”(0.5488), | 4098 |
| | | | | | o: “Bacteroidales”(0.3073), f: “Porphyromonadaceae”(0.1137), g: Barnesiella(0.0148), | |
| | | | | | s: Barnesiella_{—}viscericola(0.0019) | |
| Ascusb_20B | 202203086 | Ascusb_20 | 100 | 0.44888 | d: Bacteria(1.0000), p: Firmicutes(0.7000), c: Clostridia(0.3500), | 4099 |
| | | | | | o: Clostridiales(0.1680), f: Lachnospiraceae(0.0437), g: Clostridium_XIVa(0.0066), | |
| | | | | | s: Clostridium_{—}aminophilum(0.0007) | |
| Ascusb_1989B | 202203086 | Ascusb_1989 | 99.1 | 0.55476 | d: Bacteria(1.0000), p: “Bacteroidetes”(1.0000), c: “Bacteroidia”(1.0000), | 4100 |
| | | | | | o: “Bacteroidales”(1.0000), f: “Prevotellaceae”(0.7700), g: Prevotella(0.5929), | |
| | | | | | s: Prevotella_{—}brevis(0.2668) | |
| Ascusb_132D | 202203086 | Ascusb_132 | 99.1 | 0.57452 | d: Bacteria(1.0000), p: “Bacteroidetes”(1.0000), c: “Bacteroidia”(0.9800), | 4101 |
| | | | | | o: “Bacteroidales”(0.9604), f: “Prevotellaceae”(0.7491), g: Prevotella(0.5768), | |
| | | | | | s: Prevotella_{—}brevis(0.2769) | |
| Ascusb_3718C | 202203086 | Ascusb_3718 | 98.2 | 0.58217 | d: Bacteria(1.0000), p: “Bacteroidetes”(1.0000), c: “Bacteroidia”(1.0000), | 4102 |
| | | | | | o: “Bacteroidales”(1.0000), f: “Prevotellaceae”(0.7800), g: Prevotella(0.6084), | |
| | | | | | s: Prevotella_{—}brevis(0.3590) | |
| Ascusb_18A | 202203086 | Ascusb_18 | 99.6 | 0.83457 | d: Bacteria(1.0000), p: Firmicutes(0.7500), c: Erysipelotrichia(0.3675), | 4103 |
| | | | | | o: Erysipelotrichales(0.1801), f: Erysipelotrichaceae(0.0882), g: Erysipelothrix(0.0238), | |
| | | | | | s: Erysipelothrix_{—}tonsillarum(0.0043) | |
| Ascusb_18B | 202203086 | Ascusb_18 | 100 | 0.8253 | d: Bacteria(1.0000), p: Firmicutes(0.5215), c: Erysipelotrichia(0.2851), | 4104 |
| | | | | | o: Erysipelotrichales(0.1324), f: Erysipelotrichaceae(0.0570), g: Bulleidia(0.0073) | |
| Ascusb_2495A | 202203086 | Ascusb_2495 | 100 | 0.5889 | d: Bacteria(1.0000), p: Firmicutes(0.9400), c: Erysipelotrichia(0.2068), | 4105 |
| | | | | | o: Erysipelotrichales(0.0455), f: Erysipelotrichaceae(0.0100), g: Turicibacter(0.0022), | |
| | | | | | s: Turicibacter_{—}sanguinis(0.0005) | |
| Ascusb_211C | 202203086 | Ascusb_211 | 99.6 | 0.58809 | d: Bacteria(1.0000), p: “Bacteroidetes”(1.0000), c: “Bacteroidia”(1.0000), | 4106 |
| | | | | | o: “Bacteroidales”(1.0000), f: “Prevotellaceae”(0.9800), g: Prevotella(0.9604), | |
| | | | | | s: Prevotella_{—}ruminicola(0.7395) | |
| Ascusb_310C | 202203086 | Ascusb_310 | 99.1 | 0.51086 | d: Bacteria(1.0000), p: “Bacteroidetes”(1.0000), c: “Bacteroidia”(1.0000), | 4107 |
| | | | | | o: “Bacteroidales”(1.0000), f: “Prevotellaceae”(0.9900), g: Prevotella(0.9801), | |
| | | | | | s: Prevotella_{—}ruminicola(0.7841) | |
| Ascusb_1924B | 202203086 | Ascusb_1924 | 99.1 | 0.59307 | d: Bacteria(1.0000), p: “Tenericutes”(0.8400), c: Mollicutes(0.7056), | 4108 |
| | | | | | o: Anaeroplasmatales(0.4304), f: Anaeroplasmataceae(0.2626), g: Anaeroplasma(0.1602), | |
| | | | | | s: Anaeroplasma_{—}abactoclasticum(0.0817) | |
| Ascusb_8863B | 202203086 | Ascusb_8863 | 99.1 | 0.54178 | d: Bacteria(1.0000), p: “Tenericutes”(0.9500), c: Mollicutes(0.9025), | 4109 |
| | | | | | o: Anaeroplasmatales(0.7130), f: Anaeroplasmataceae(0.5633), g: Anaeroplasma(0.4450), | |
| | | | | | s: Anaeroplasma_{—}abactoclasticum(0.3026) | |
| Ascusb_1189B | 202203086 | Ascusb_1189 | 99.1 | 0.58266 | d: Bacteria(1.0000), p: “Tenericutes”(0.8800), c: Mollicutes(0.7744), | 4110 |
| | | | | | o: Anaeroplasmatales(0.5653), f: Anaeroplasmataceae(0.4127), g: Anaeroplasma(0.3013), | |
| | | | | | s: Anaeroplasma_{—}abactoclasticum(0.1988) | |
| Ascusb_2725B | 202203086 | Ascusb_2725 | 98.7 | 0.6506 | d: Bacteria(1.0000), p: “Tenericutes”(0.8600), c: Mollicutes(0.7396), | 4111 |
| | | | | | o: Anaeroplasmatales(0.5547), f: Anaeroplasmataceae(0.4160), g: Anaeroplasma(0.3120), | |
| | | | | | s: Anaeroplasma_{—}abactoclasticum(0.2184) | |
| Ascusb_2446B | 202203086 | Ascusb_2446 | 99.1 | 0.61151 | d: Bacteria(1.0000), p: “Bacteroidetes”(1.0000), c: “Bacteroidia”(0.9200), | 4112 |
| | | | | | o: “Bacteroidales”(0.8464), f: “Prevotellaceae”(0.7702), g: Prevotella(0.7009), | |
| | | | | | s: Prevotella_{—}brevis(0.6308) | |
| Ascusb_2900A | 202203086 | Ascusb_2900 | 98.2 | 0.51675 | d: Bacteria(1.0000), p: Firmicutes(0.7300), c: Clostridia(0.4453), | 4113 |
| | | | | | o: Clostridiales(0.2716), f: Lachnospiraceae(0.1494), g: Syntrophococcus(0.0329), | |
| | | | | | s: Syntrophococcus_{—}sucromutans(0.0072) | |
| Ascusb_2067A | 202203086 | Ascusb_2067 | 99.1 | 0.69212 | d: Bacteria(1.0000), p: “Bacteroidetes”(0.8900), c: Sphingobacteriia(0.3382), | 4114 |
| | | | | | o: “Sphingobacteriales”(0.1285), f: Chitinophagaceae(0.0437), g: Chitinophaga(0.0131), | |
| | | | | | s: Chitinophaga_{—}qingshengii(0.0038) | |
| Ascusb_1731B | 202203086 | Ascusb_1731 | 99.6 | 0.63469 | d: Bacteria(1.0000), p: “Spirochaetes”(0.8700), c: Spirochaetia(0.7569), | 4115 |
| | | | | | o: Spirochaetales(0.6585), f: Spirochaetaceae(0.5729), g: Treponema(0.4182), | |
| | | | | | s: Treponema_{—}stenostreptum(0.0627) | |
| Ascusb_1785B | 202203086 | Ascusb_1785 | 100 | 0.83433 | d: Bacteria(1.0000), p: “Bacteroidetes”(0.7700), c: “Bacteroidia”(0.2849), | 4116 |
| | | | | | o: “Bacteroidales”(0.1054), f: Bacteroidaceae(0.0095), g: Bacteroides(0.0009), | |
| | | | | | s: Bacteroides_{—}uniformis(0.0001) | |
| Ascusb_1906B | 202203086 | Ascusb_1906 | 99.6 | 0.54119 | d: Bacteria(1.0000), p: “Tenericutes”(0.8400), c: Mollicutes(0.7056), | 4117 |
| | | | | | o: Anaeroplasmatales(0.5715), f: Anaeroplasmataceae(0.4629), g: Anaeroplasma(0.3750), | |
| | | | | | s: Anaeroplasma_{—}abactoclasticum(0.2100) | |
| Ascusb_115B | 202203086 | Ascusb_115 | 100 | 0.68438 | d: Bacteria(1.0000), p: “Bacteroidetes”(1.0000), c: “Bacteroidia”(1.0000), | 4118 |
| | | | | | o: “Bacteroidales”(1.0000), f: “Prevotellaceae”(0.9800), g: Prevotella(0.9604), | |
| | | | | | s: Prevotella_{—}ruminicola(0.8932) | |
| Ascusb_14159A | 202203086 | Ascusb_14159 | 98.7 | 0.58 | d: Bacteria(1.0000), p: “Bacteroidetes”(0.9900), c: “Bacteroidia”(0.9801), | 4119 |
| | | | | | o: “Bacteroidales”(0.9703), f: “Prevotellaceae”(0.9218), g: Prevotella(0.8757), | |
| | | | | | s: Prevotella_{—}bryantii(0.4641) | |
| Ascusb_14763A | 202203086 | Ascusb_14763 | 98.7 | 0.66999 | d: Bacteria(1.0000), p: “Bacteroidetes”(0.9900), c: “Bacteroidia”(0.9702), | 4120 |
| | | | | | o: “Bacteroidales”(0.9508), f: “Prevotellaceae”(0.9033), g: Prevotella(0.8581), | |
| | | | | | s: Prevotella_{—}bryantii(0.4462) | |
| Ascusb_14918A | 202203086 | Ascusb_14918 | 99.6 | 0.51786 | d: Bacteria(1.0000), p: “Bacteroidetes”(0.9700), c: “Bacteroidia”(0.9409), | 4121 |
| | | | | | o: “Bacteroidales”(0.9127), f: “Prevotellaceae”(0.8853), g: Prevotella(0.8587), | |
| | | | | | s: Prevotella_{—}oulorum(0.2834) | |
| Ascusb_2188C | 202203086 | Ascusb_2188 | 99.6 | 0.53226 | d: Bacteria(1.0000), p: “Bacteroidetes”(0.9800), c: “Bacteroidia”(0.5390), | 4122 |
| | | | | | o: “Bacteroidales”(0.2965), f: “Porphyromonadaceae”(0.0949), g: Barnesiella(0.0133), | |
| | | | | | s: Barnesiella_{—}viscericola(0.0019) | |
| Ascusb_668B | 202203086 | Ascusb_668 | 99.1 | 0.63275 | d: Bacteria(1.0000), p: “Bacteroidetes”(0.9800), c: Flavobacteriia(0.5782), | 4123 |
| | | | | | o: “Flavobacteriales”(0.3411), f: Flavobacteriaceae(0.1876), g: Lutibacter(0.0356), | |
| | | | | | s: Lutibacter_{—}flavus(0.0068) | |
| Ascusb_804C | 202203086 | Ascusb_804 | 99.1 | 0.65689 | d: Bacteria(1.0000), p: “Bacteroidetes”(0.9800), c: “Bacteroidia”(0.3528), | 4124 |
| | | | | | o: “Bacteroidales”(0.1270), f: “Porphyromonadaceae”(0.0292), g: Barnesiella(0.0050), | |
| | | | | | s: Barnesiella_{—}viscericola(0.0008) | |
| Ascusb_773A | 202203086 | Ascusb_773 | 100 | 0.62437 | d: Bacteria(1.0000), p: “Bacteroidetes”(0.8900), c: “Bacteroidia”(0.5429), | 4125 |
| | | | | | o: “Bacteroidales”(0.3312), f: “Porphyromonadaceae”(0.1325), g: Paludibacter(0.0106), | |
| | | | | | s: Paludibacter_{—}propionicigenes(0.0008) | |
| Ascusb_15604A | 202203086 | Ascusb_15604 | 99.1 | 0.49701 | d: Bacteria(1.0000), p: “Bacteroidetes”(0.9200), c: Flavobacteriia(0.2576), | 4126 |
| | | | | | o: “Flavobacteriales”(0.0721), f: Flavobacteriaceae(0.0166), g: Gelidibacter(0.0023), | |
| | | | | | s: Gelidibacter_{—}algens(0.0003) | |
| Ascusb_17906A | 202203086 | Ascusb_17906 | 98.2 | 0.51353 | d: Bacteria(1.0000), p: “Bacteroidetes”(0.9200), c: “Bacteroidia”(0.8004), | 4127 |
| | | | | | o: “Bacteroidales”(0.6963), f: Bacteroidaceae(0.3134), g: Bacteroides(0.1410), | |
| | | | | | s: Bacteroides_{—}plebeius(0.0240) | |
| Ascusb_15152B | 202203086 | Ascusb_15152 | 98.7 | 0.45406 | d: Bacteria(1.0000), p: Firmicutes(0.9900), c: Negativicutes(0.9603), | 4128 |
| | | | | | o: Selenomonadales(0.9315), f: Acidaminococcaceae(0.9035), g: Succiniclasticum(0.8674), | |
| | | | | | s: Succiniclasticum_{—}ruminis(0.8327) | |
| Ascusb_136B | 202203086 | Ascusb_136 | 99.1 | 0.52655 | d: Bacteria(1.0000), p: “Bacteroidetes”(1.0000), c: “Bacteroidia”(1.0000), | 4129 |
| | | | | | o: “Bacteroidales”(1.0000), f: “Prevotellaceae”(0.9200), g: Prevotella(0.8464), | |
| | | | | | s: Prevotella_{—}brevis(0.5078) | |
| Ascusb_45A | 202203086 | Ascusb_45 | 100 | 0.58081 | d: Bacteria(1.0000), p: “Bacteroidetes”(0.9800), c: “Bacteroidia”(0.9506), | 4130 |
| | | | | | o: “Bacteroidales”(0.9221), f: “Prevotellaceae”(0.8852), g: Prevotella(0.8498), | |
| | | | | | s: Prevotella_{—}oulorum(0.2804) | |
| Ascusb_2598A | 202203086 | Ascusb_2598 | 99.6 | 0.472 | d: Bacteria(1.0000), p: “Bacteroidetes”(0.9900), c: “Bacteroidia”(0.9702), | 4131 |
| | | | | | o: “Bacteroidales”(0.9508), f: “Prevotellaceae”(0.9318), g: Prevotella(0.9131), | |
| | | | | | s: Prevotella_{—}oulorum(0.2831) | |
| Ascusb_17962A | 202203086 | Ascusb_17962 | 99.6 | 0.46798 | d: Bacteria(1.0000), p: “Bacteroidetes”(0.9900), c: “Bacteroidia”(0.9801), | 4132 |
| | | | | | o: “Bacteroidales”(0.9703), f: “Prevotellaceae”(0.9606), g: Prevotella(0.9510), | |
| | | | | | s: Prevotella_{—}oulorum(0.3233) | |
| Ascusb_13295A | 202203086 | Ascusb_13295 | 98.7 | 0.56074 | d: Bacteria(1.0000), p: “Bacteroidetes”(0.9800), c: “Bacteroidia”(0.9604), | 4133 |
| | | | | | o: “Bacteroidales”(0.9412), f: “Prevotellaceae”(0.9224), g: Prevotella(0.9039), | |
| | | | | | s: Prevotella_{—}multisaccharivorax(0.3254) | |
| Ascusb_4900A | 202203086 | Ascusb_4900 | 98.7 | 0.47453 | d: Bacteria(1.0000), p: “Bacteroidetes”(0.9900), c: “Bacteroidia”(0.9702), | 4134 |
| | | | | | o: “Bacteroidales”(0.9508), f: “Prevotellaceae”(0.9033), g: Prevotella(0.8581), | |
| | | | | | s: Prevotellabryantii(0.4548) | |
| Ascusb_223C | 202203086 | Ascusb_223 | 98.7 | 0.49 | d: Bacteria(1.0000), p: “Bacteroidetes”(0.9900), c: “Bacteroidia”(0.9801), | 4135 |
| | | | | | o: “Bacteroidales”(0.9703), f: “Prevotellaceae”(0.9606), g: Prevotella(0.9510), | |
| | | | | | s: Prevotella_{—}brevis(0.9415) | |
| Ascusb_198C | 202203086 | Ascusb_198 | 98.7 | 0.54315 | d: Bacteria(1.0000), p: “Bacteroidetes”(1.0000), c: “Bacteroidia”(1.0000), | 4136 |
| | | | | | o: “Bacteroidales”(1.0000), f: “Prevotellaceae”(1.0000), g: Prevotella(1.0000), | |
| | | | | | s: Prevotella_{—}brevis(1.0000) | |
| Ascusb_19281B | 202203086 | Ascusb_19281 | 100 | 0.65842 | d: Bacteria(1.0000), p: “Bacteroidetes”(1.0000), c: “Bacteroidia”(1.0000), | 4137 |
| | | | | | o: “Bacteroidales”(1.0000), f: “Prevotellaceae”(0.9400), g: Prevotella(0.8648), | |
| | | | | | s: Prevotella_{—}bryantii(0.3978) | |
| Ascusb_20167B | 202203086 | Ascusb_20167 | 100 | 0.51035 | d: Bacteria(1.0000), p: “Bacteroidetes”(1.0000), c: “Bacteroidia”(1.0000), | 4138 |
| | | | | | o: “Bacteroidales”(1.0000), f: “Prevotellaceae”(0.9200), g: Prevotella(0.8280), | |
| | | | | | s: Prevotella_{—}bryantii(0.3478) | |
| Ascusb_1125B | 202203086 | Ascusb_1125 | 100 | 0.66122 | d: Bacteria(1.0000), p: “Bacteroidetes”(1.0000), c: “Bacteroidia”(1.0000), | 4139 |
| | | | | | o: “Bacteroidales”(1.0000), f: “Prevotellaceae”(0.9300), g: Prevotella(0.8463), | |
| | | | | | s: Prevotella_{—}bryantii(0.3808) | |
| Ascusb_14943B | 202203086 | Ascusb_14943 | 100 | 0.65057 | d: Bacteria(1.0000), p: “Bacteroidetes”(1.0000), c: “Bacteroidia”(1.0000), | 4140 |
| | | | | | o: “Bacteroidales”(1.0000), f: “Prevotellaceae”(0.9200), g: Prevotella(0.8188), | |
| | | | | | s: Prevotellabryantii(0.3685) | |
| Ascusb_19296B | 202203086 | Ascusb_19296 | 98.7 | 0.71794 | d: Bacteria(1.0000), p: “Bacteroidetes”(1.0000), c: “Bacteroidia”(1.0000), | 4141 |
| | | | | | o: “Bacteroidales”(1.0000), f: “Prevotellaceae”(0.9500), g: Prevotella(0.9025), | |
| | | | | | s: Prevotellabryantii(0.4422) | |
| Ascusb_624C | 202203086 | Ascusb_624 | 99.6 | 0.49203 | d: Bacteria(1.0000), p: “Bacteroidetes”(1.0000), c: “Bacteroidia”(1.0000), | 4142 |
| | | | | | o: “Bacteroidales”(1.0000), f: “Prevotellaceae”(0.9500), g: Prevotella(0.9025), | |
| | | | | | s: Prevotella_{—}brevis(0.7220) | |
| Ascusb_579B | 202203086 | Ascusb_579 | 98.7 | 0.57203 | d: Bacteria(1.0000), p: “Bacteroidetes”(1.0000), c: “Bacteroidia”(1.0000), | 4143 |
| | | | | | o: “Bacteroidales”(1.0000), f: “Prevotellaceae”(09700), g: Prevotella(0.9409), | |
| | | | | | s: Prevotella_{—}brevis(0.6963) | |
| Ascusb_1575A | 202203086 | Ascusb_1575 | 100 | 0.5001 | d: Bacteria(1.0000), p: “Bacteroidetes”(0.9900), c: “Bacteroidia”(0.9603), | 4144 |
| | | | | | o: “Bacteroidales”(0.9315), f: “Prevotellaceae”(0.8663), g: Prevotella(0.8056), | |
| | | | | | s: Prevotella_{—}bryantii(0.4592) | |
| Ascusb_21055A | 202203086 | Ascusb_21055 | 98.7 | 0.57245 | d: Bacteria(1.0000), p: “Bacteroidetes”(0.9900), c: “Bacteroidia”(0.9702), | 4145 |
| | | | | | o: “Bacteroidales”(0.9508), f: “Prevotellaceae”(0.9033), g: Prevotella(0.8581), | |
| | | | | | s: Prevotella_{—}bryantii(0.4548) | |
| Ascusb_4208B | 202203087 | Ascusb_4208 | 100 | 0.47458 | d: Bacteria(1.0000), p: Firmicutes(0.9200), c: Erysipelotrichia(0.2024), | 4146 |
| | | | | | o: Erysipelotrichales(0.0445), f: Erysipelotrichaceae(0.0098), g: Turicibacter(0.0018), | |
| | | | | | s: Turicibacter_{—}sanguinis(0.0003) | |
| Ascusb_3089C | 202203087 | Ascusb_3089 | 99.6 | 0.54157 | d: Bacteria(1.0000), p: Firmicutes(0.7700), c: Clostridia(0.5005), | 4147 |
| | | | | | o: Clostridiales(0.3253), f: Christensenellaceae(0.0260), g: Christensenella(0.0021), | |
| | | | | | s: Christensenella_{—}minuta(0.0002) | |
| Ascusb_2255A | 202203086 | Ascusb_2255 | 98.7 | 0.65925 | d: Bacteria(1.0000), p: “Bacteroidetes”(1.0000), c: “Bacteroidia”(1.0000), | 4148 |
| | | | | | o: “Bacteroidales”(1.0000), f: Bacteroidaceae(0.6700), g: Bacteroides(0.4489), | |
| | | | | | s: Bacteroides_{—}plebeius(0.2155) | |
| Ascusb_338A | 202203087 | Ascusb_338 | 97.8 | 0.55013 | d: Bacteria(1.0000), p: Firmicutes(0.9600), c: Clostridia(0.9216), | 4149 |
| | | | | | o: Clostridiales(0.8847), f: Lachnospiraceae(0.8051), g: Lachnospiracea_{—}incertae_{—}sedis(0.4992), | |
| | | | | | s: Eubacterium_{—}ruminantium(0.2945) | |
| Ascusb_10663B | 202203087 | Ascusb_10663 | 99.6 | 0.73098 | d: Bacteria(1.0000), p: “Bacteroidetes”(1.0000), c: “Bacteroidia”(0.9900), | 4150 |
| | | | | | o: “Bacteroidales”(0.9801), f: “Prevotellaceae”(0.8625), g: Prevotella(0.7504), | |
| | | | | | s: Prevotella_{—}brevis(0.3827) | |
| Ascusb_4840B | 202203087 | Ascusb_4840 | 98.7 | 0.47849 | d: Bacteria(1.0000), p: “Bacteroidetes”(1.0000), c: “Bacteroidia”(0.9600), | 4151 |
| | | | | | o: “Bacteroidales”(0.9216), f: Bacteroidaceae(0.8663), g: Bacteroides(0.8143), | |
| | | | | | s: Bacteroides_{—}coprocola(0.3013) | |
| Ascusb_1834B | 202203087 | Ascusb_1834 | 99.6 | 0.60998 | d: Bacteria(1.0000), p: Firmicutes(0.9800), c: Clostridia(0.9604), | 4152 |
| | | | | | o: Clostridiales(0.9412), f: Lachnospiraceae(0.8753), g: Lachnospiracea_{—}incertae_{—}sedis(0.4814) | |
| Ascusb_3969A | 202203087 | Ascusb_3969 | 100 | 0.50953 | d: Bacteria(1.0000), p: Firmicutes(0.3300), c: Bacilli(0.0957), | 4153 |
| | | | | | o: Bacillales(0.0220), f: Staphylococcaceae(0.0026), g: Jeotgalicoccus(0.0002), | |
| | | | | | s: Jeotgalicoccushuakuii(0.0000) | |
| Ascusb_1115A | 202203087 | Ascusb_1115 | 98.2 | 0.59078 | d: Bacteria(1.0000), p: Firmicutes(0.8000), c: Clostridia(0.5520), | 4154 |
| | | | | | o: Clostridiales(0.3698), f: Clostridiaceae_1(0.0666), g: Proteiniclasticum(0.0033), | |
| | | | | | s: Proteiniclasticum_{—}ruminis(0.0002) | |
| Ascusb_724B | 202203087 | Ascusb_724 | 99.1 | 0.60624 | d: Bacteria(1.0000), p: “Bacteroidetes”(0.9900), c: “Bacteroidia”(0.9702), | 4155 |
| | | | | | o: “Bacteroidales”(0.9508), f: “Prevotellaceae”(05705), g: Prevotella(0.3081), | |
| | | | | | s: Prevotella_{—}brevis(0.1386) | |
| Ascusb_2886C | 202203087 | Ascusb_2886 | 98.6 | 0.46944 | d: Bacteria(1.0000), p: “Bacteroidetes”(0.9800), c: “Bacteroidia”(0.9408), | 4156 |
| | | | | | o: “Bacteroidales”(0.9032), f: “Prevotellaceae”(0.5690), g: Prevotella(0.3300), | |
| | | | | | s: Prevotella_{—}brevis(0.1518) | |
| Ascusb_2027B | 202203087 | Ascusb_2027 | 98.6 | 0.62292 | d: Bacteria(1.0000), p: “Bacteroidetes”(0.9900), c: “Bacteroidia”(0.9405), | 4157 |
| | | | | | o: “Bacteroidales”(0.8935), f: “Prevotellaceae”(05182), g: Prevotella(0.2487), | |
| | | | | | s: Prevotella_{—}brevis(0.1020) | |
| Ascusb_514B | 202203087 | Ascusb_514 | 100 | 0.67484 | d: Bacteria(1.0000), p: Firmicutes(0.9400), c: Clostridia(0.7708), | 4158 |
| | | | | | o: Clostridiales(0.6012), f: Ruminococcaceae(0.2706), g: Clostridium_III(0.1028), | |
| | | | | | s: Clostridium_{—}termitidis(0.0226) | |
| Ascusb_4119C | 202203087 | Ascusb_4119 | 97.8 | 0.61021 | d: Bacteria(1.0000), p: Firmicutes(0.9400), c: Clostridia(0.7802), | 4159 |
| | | | | | o: Clostridiales(0.5930), f: Ruminococcaceae(0.3321), g: Clostridium_III(0.1461), | |
| | | | | | s: Clostridium_{—}termitidis(0.0438) | |
| Ascusb_1549A | 202203087 | Ascusb_1549 | 98.2 | 0.49162 | d: Bacteria(1.0000), p: “Bacteroidetes”(0.9800), c: “Bacteroidia”(0.9114), | 4160 |
| | | | | | o: “Bacteroidales”(0.8476), f: “Prevotellaceae”(0.3475), g: Prevotella(0.1321), | |
| | | | | | s: Prevotella_{—}oulorum(0.0370) | |
| Ascusb_4552A | 202203087 | Ascusb_4552 | 99.1 | 0.53863 | d: Bacteria(1.0000), p: “Bacteroidetes”(1.0000), c: “Bacteroidia”(1.0000), | 4161 |
| | | | | | o: “Bacteroidales”(1.0000), f: “Prevotellaceae”(0.9900), g: Prevotella(0.9801), | |
| | | | | | s: Prevotella_{—}brevis(0.9409) | |
| Ascusb_9020B | 202203087 | Ascusb_9020 | 98.2 | 0.4462 | d: Bacteria(1.0000), p: “Bacteroidetes”(0.9600), c: “Bacteroidia”(0.8928), | 4162 |
| | | | | | o: “Bacteroidales”(0.8303), f: “Prevotellaceae”(0.3404), g: Prevotella(0.1260), | |
| | | | | | s: Prevotella_{—}albensis(0.0277) | |
| Ascusb_1867A | 202203087 | Ascusb_1867 | 100 | 0.56076 | d: Bacteria(1.0000), p: Firmicutes(0.4000), c: Clostridia(0.1360), | 4163 |
| | | | | | o: Clostridiales(0.0449), f: Ruminococcaceae(0.0103), g: Hydrogenoanaerobacterium(0.0009), | |
| | | | | | s: Hydrogenoanaerobacterium_{—}saccharovorans(0.0001) | |
| Ascusb_3294A | 202203087 | Ascusb_3294 | 98.2 | 0.52327 | d: Bacteria(1.0000), p: Firmicutes(0.3700), c: Clostridia(0.1221), | 4164 |
| | | | | | o: Clostridiales(0.0403), f: Ruminococcaceae(0.0101), g: Hydrogenoanaerobacterium(0.0009), | |
| | | | | | s: Hydrogenoanaerobacterium_{—}saccharovorans(0.0001) | |
| Ascusb_855A | 202203087 | Ascusb_855 | 99.1 | 0.51398 | d: Bacteria(1.0000), p: Firmicutes(0.9000), c: Clostridia(0.8010), | 4165 |
| | | | | | o: Clostridiales(0.7049), f: Lachnospiraceae(0.4229), g: Clostridium_XIVa(0.1607), | |
| | | | | | s: Clostridium_{—}fimetarium(0.0193) | |
| Ascusb_1281A | 202203087 | Ascusb_1281 | 98.2 | 0.68245 | d: Bacteria(1.0000), p: Firmicutes(0.8900), c: Clostridia(0.7832), | 4166 |
| | | | | | o: Clostridiales(0.6736), f: Lachnospiraceae(0.4378), g: Clostridium_XIVa(0.1926), | |
| | | | | | s: Clostridium_{—}fimetarium(0.0405) | |
| Ascusb_1985C | 202203087 | Ascusb_1985 | 99.6 | 0.57661 | d: Bacteria(1.0000), p: “Bacteroidetes”(0.9900), c: “Bacteroidia”(0.8910), | 4167 |
| | | | | | o: “Bacteroidales”(0.8019), f: “Prevotellaceae”(0.5212), g: Prevotella(0.3388), | |
| | | | | | s: Prevotella_{—}bryantii(0.0881) | |
| Ascusb_14185B | 202203087 | Ascusb_14185 | 99.1 | 0.54439 | d: Bacteria(1.0000), p: “Bacteroidetes”(0.9800), c: “Bacteroidia”(0.9114), | 4168 |
| | | | | | o: “Bacteroidales”(0.8476), f: “Prevotellaceae”(0.5679), g: Prevotella(0.3805), | |
| | | | | | s: Prevotella_{—}oryzae(0.0723) | |
| Ascusb_3092B | 202203087 | Ascusb_3092 | 98.2 | 0.52321 | d: Bacteria(1.0000), p: “Bacteroidetes”(0.9400), c: “Bacteroidia”(0.7802), | 4169 |
| | | | | | o: “Bacteroidales”(0.6476), f: “Prevotellaceae”(0.3756), g: Prevotella(0.2178), | |
| | | | | | s: Prevotella_{—}bryantii(0.0349) | |
| Ascusb_15051A | 202203087 | Ascusb_15051 | 97.3 | 0.52567 | d: Bacteria(1.0000), p: “Bacteroidetes”(0.9600), c: “Bacteroidia”(0.8256), | 4170 |
| | | | | | o: “Bacteroidales”(0.7100), f: “Prevotellaceae”(0.4757), g: Prevotella(0.3187), | |
| | | | | | s: Prevotella_{—}oryzae(0.0669) | |
| Ascusb_35A | 202203087 | Ascusb_35 | 100 | 0.73225 | d: Bacteria(1.0000), p: “Proteobacteria”(1.0000), c: Alphaproteobacteria(1.0000), | 4171 |
| | | | | | o: Rhizobiales(1.0000), f: Brab_rhizobiaceae(1.0000), g: Brab_{—}rhizobium(0.8900), | |
| | | | | | s: Brab_{—}rhizobiumpachyrhizi(0.2759) | |
| Ascusb_8042A | 202203087 | Ascusb_8042 | 98.2 | 0.48494 | d: Bacteria(1.0000), p: “Bacteroidetes”(0.3800), c: “Bacteroidia”(0.0684), | 4172 |
| | | | | | o: “Bacteroidales”(0.0123), f: “Porphyromonadaceae”(0.0018), g: Proteiniphilum(0.0002), | |
| | | | | | s: Proteiniphilum_{—}acetatigenes(0.0000) | |
| Ascusb_3554A | 202203087 | Ascusb_3554 | 98.7 | 0.49361 | d: Bacteria(1.0000), p: “Tenericutes”(0.9600), c: Mollicutes(0.9216), | 4173 |
| | | | | | o: Anaeroplasmatales(0.8018), f: Anaeroplasmataceae(0.6976), g: Anaeroplasma(0.6069), | |
| | | | | | s: Anaeroplasma_{—}varium(0.2610) | |
| Ascusb_5201B | 202203087 | Ascusb_5201 | 99.1 | 0.50458 | d: Bacteria(1.0000), p: “Bacteroidetes”(0.7300), c: “Bacteroidia”(0.3358), | 4174 |
| | | | | | o: “Bacteroidales”(0.1545), f: “Porphyromonadaceae”(0.0386), g: Butyricimonas(0.0042), | |
| | | | | | s: Butyricimonas_{—}faecihominis(0.0004) | |
| Ascusb_6229A | 202203087 | Ascusb_6229 | 100 | 0.63023 | d: Bacteria(1.0000), p: “Tenericutes”(0.3100), c: Mollicutes(0.0961), | 4175 |
| | | | | | o: Entomoplasmatales(0.0221), f: Spiroplasmataceae(0.0051), g: Spiroplasma(0.0012), | |
| | | | | | s: Spiroplasma_{—}taiwanense(0.0001) | |
| Ascusb_2648A | 202203087 | Ascusb_2648 | 98.7 | 0.59551 | d: Bacteria(1.0000), p: “Bacteroidetes”(0.9600), c: “Bacteroidia”(0.8256), | 4176 |
| | | | | | o: “Bacteroidales”(0.7100), f: Bacteroidaceae(0.1846), g: Bacteroides(0.0480), | |
| | | | | | s: Bacteroides_{—}plebeius(0.0086) | |
| Ascusb_4062A | 202203087 | Ascusb_4062 | 98.7 | 0.55964 | d: Bacteria(1.0000), p: “Bacteroidetes”(0.9800), c: “Bacteroidia”(0.9310), | 4177 |
| | | | | | o: “Bacteroidales”(0.8844), f: Bacteroidaceae(0.1946), g: Bacteroides(0.0428), | |
| | | | | | s: Bacteroides_{—}plebeius(0.0056) | |
| Ascusb_3539A | 202203087 | Ascusb_3539 | 98.2 | 0.57977 | d: Bacteria(1.0000), p: Firmicutes(0.9400), c: Clostridia(0.8836), | 4178 |
| | | | | | o: Clostridiales(0.8306), f: Lachnospiraceae(0.7558), g: Lachnospiracea_{—}incertae_{—}sedis(0.3552), | |
| | | | | | s: Eubacterium_{—}ruminantium(0.1350) | |
| Ascusb_10976B | 202203087 | Ascusb_10976 | 99.6 | 0.4498 | d: Bacteria(1.0000), p: “Bacteroidetes”(0.9900), c: “Bacteroidia”(0.9504), | 4179 |
| | | | | | o: “Bacteroidales”(0.9124), f: “Prevotellaceae”(05474), g: Prevotella(0.3285), | |
| | | | | | s: Prevotella_{—}brevis(0.1577) | |
| Ascusb_15111B | 202203087 | Ascusb_15111 | 99.6 | 0.59032 | d: Bacteria(1.0000), p: “Bacteroidetes”(0.9900), c: “Bacteroidia”(0.9504), | 4180 |
| | | | | | o: “Bacteroidales”(0.9124), f: “Prevotellaceae”(0.5839), g: Prevotella(0.3737), | |
| | | | | | s: Prevotella_{—}brevis(0.1794) | |
| Ascusb_15117B | 202203087 | Ascusb_15117 | 99.1 | 0.57647 | d: Bacteria(1.0000), p: “Bacteroidetes”(1.0000), c: “Bacteroidia”(0.9700), | 4181 |
| | | | | | o: “Bacteroidales”(0.9409), f: “Prevotellaceae”(05928), g: Prevotella(0.3734), | |
| | | | | | s: Prevotella_{—}brevis(0.1942) | |
| Ascusb_9316A | 202203087 | Ascusb_9316 | 97.3 | 0.45938 | d: Bacteria(1.0000), p: “Bacteroidetes”(0.6700), c: “Bacteroidia”(0.4020), | 4182 |
| | | | | | o: “Bacteroidales”(0.2412), f: “Prevotellaceae”(0.0917), g: Prevotella(0.0348), | |
| | | | | | s: Prevotella_{—}brevis(0.0094) | |
| Ascusb_992A | 202203087 | Ascusb_992 | 99.6 | 0.67593 | d: Bacteria(1.0000), p: “Bacteroidetes”(0.9900), c: “Bacteroidia”(0.9207), | 4183 |
| | | | | | o: “Bacteroidales”(0.8563), f: “Prevotellaceae”(0.4709), g: Prevotella(0.2543), | |
| | | | | | s: Prevotella_{—}bryantii(0.0280) | |
| Ascusb_12024A | 202203087 | Ascusb_12024 | 99.1 | 0.63984 | d: Bacteria(1.0000), p: “Bacteroidetes”(0.9800), c: “Bacteroidia”(0.9114), | 4184 |
| | | | | | o: “Bacteroidales”(0.8476), f: Bacteroidaceae(0.2373), g: Bacteroides(0.0665), | |
| | | | | | s: Bacteroides_{—}massiliensis(0.0073) | |
| Ascusb_3175A | 202203087 | Ascusb_3175 | 98.7 | 0.68723 | d: Bacteria(1.0000), p: “Bacteroidetes”(1.0000), c: “Bacteroidia”(0.9400), | 4185 |
| | | | | | o: “Bacteroidales”(0.8836), f: Bacteroidaceae(0.2828), g: Bacteroides(0.0905), | |
| | | | | | s: Bacteroides_{—}massiliensis(0.0136) | |
| Ascusb_5433A | 202203087 | Ascusb_5433 | 97.8 | 0.51896 | d: Bacteria(1.0000), p: “Bacteroidetes”(0.9800), c: “Bacteroidia”(0.9212), | 4186 |
| | | | | | o: “Bacteroidales”(0.8659), f: Bacteroidaceae(0.3983), g: Bacteroides(0.1832), | |
| | | | | | s: Bacteroides_{—}massiliensis(0.0293) | |
| Ascusb_17652B | 202203087 | Ascusb_17652 | 99.6 | 0.85261 | d: Bacteria(1.0000), p: Firmicutes(0.8000), c: Clostridia(0.6320), | 4187 |
| | | | | | o: Clostridiales(0.4930), f: Lachnospiraceae(0.2514), g: Roseburia(0.0905), | |
| | | | | | s: Roseburia_{—}hominis(0.0226) | |
| Ascusb_511A | 202203087 | Ascusb_511 | 98.7 | 0.48845 | d: Bacteria(1.0000), p: Firmicutes(0.9300), c: Clostridia(0.8649), | 4188 |
| | | | | | o: Clostridiales(0.8044), f: Lachnospiraceae(0.7078), g: Lachnobacterium(0.1345), | |
| | | | | | s: Lachnobacterium_{—}bovis(0.0256) | |
| Ascusb_312A | 202203087 | Ascusb_312 | 98.7 | 0.5575 | d: Bacteria(1.0000), p: Firmicutes(0.9400), c: Clostridia(0.8836), | 4189 |
| | | | | | o: Clostridiales(0.8306), f: Lachnospiraceae(0.7641), g: Lachnospiracea_{—}incertae_{—}sedis(0.3897), | |
| | | | | | s: Eubacterium_{—}ruminantium(0.1676) | |
| Ascusb_19874A | 202203087 | Ascusb_19874 | 99.6 | 0.59416 | d: Bacteria(1.0000), p: “Proteobacteria”(0.9100), c: Gammaproteobacteria(0.7644), | 4190 |
| | | | | | o: Oceanospirillales(0.2064), f: Alcanivoracaceae(0.0371), g: Kangiella(0.0067), | |
| | | | | | s: Kangiella_{—}spongicola(0.0011) | |
| Ascusb_6130A | 202203087 | Ascusb_6130 | 99.6 | 0.44883 | d: Bacteria(1.0000), p: “Bacteroidetes”(0.9900), c: “Bacteroidia”(0.9504), | 4191 |
| | | | | | o: “Bacteroidales”(0.9124), f: “Prevotellaceae”(0.6934), g: Prevotella(0.5201), | |
| | | | | | s: Prevotella_{—}bryantii(0.0832) | |
| Ascusb_3228A | 202203087 | Ascusb_3228 | 99.6 | 0.57501 | d: Bacteria(1.0000), p: “Proteobacteria”(0.9000), c: Gammaproteobacteria(0.7110), | 4192 |
| | | | | | o: Oceanospirillales(0.1635), f: Alcanivoracaceae(0.0229), g: Kangiella(0.0032), | |
| | | | | | s: Kangiella_{—}spongicola(0.0004) | |
| Ascusb_116A | 202203087 | Ascusb_116 | 99.6 | 0.66022 | d: Bacteria(1.0000), p: “Proteobacteria”(0.9500), c: Gammaproteobacteria(0.8265), | 4193 |
| | | | | | o: Aeromonadales(0.2149), f: Succinivibrionaceae(0.0494), g: Succinivibrio(0.0064), | |
| | | | | | s: Succinivibrio_{—}dextrinosolvens(0.0008) | |
| Ascusb_439A | 202203087 | Ascusb_439 | 99.6 | 0.62509 | d: Bacteria(1.0000), p: “Proteobacteria”(0.9600), c: Gammaproteobacteria(0.8448), | 4194 |
| | | | | | o: Aeromonadales(0.2028), f: Succinivibrionaceae(0.0426), g: Succinivibrio(0.0060), | |
| | | | | | s: Succinivibrio_{—}dextrinosolvens(0.0008) | |
| Ascusb_10919A | 202203087 | Ascusb_10919 | 98.2 | 0.51513 | d: Bacteria(1.0000), p: “Proteobacteria”(0.9400), c: Gammaproteobacteria(0.8272), | 4195 |
| | | | | | o: Alteromonadales(0.1324), f: Alteromonadaceae(0.0146), g: Glaciecola(0.0013), | |
| | | | | | s: Glaciecola_{—}punicea(0.0001) | |
| Ascusb_2272B | 202203087 | Ascusb_2272 | 99.6 | 0.55338 | d: Bacteria(1.0000), p: “Bacteroidetes”(0.9700), c: “Bacteroidia”(0.8924), | 4196 |
| | | | | | o: “Bacteroidales”(0.8210), f: “Prevotellaceae”(0.7225), g: Prevotella(0.6358), | |
| | | | | | s: Prevotella_{—}brevis(0.2098) | |
| Ascusb_19172B | 202203087 | Ascusb_19172 | 97.8 | 0.49061 | d: Bacteria(1.0000), p: “Bacteroidetes”(0.9300), c: “Bacteroidia”(0.7812), | 4197 |
| | | | | | o: “Bacteroidales”(0.6562), f: “Porphyromonadaceae”(0.4790), g: Barnesiella(0.2826), | |
| | | | | | s: Barnesiella_{—}viscericola(0.1668) | |
| Ascusb_3031A | 202203087 | Ascusb_3031 | 97.3 | 0.47916 | d: Bacteria(1.0000), p: “Bacteroidetes”(0.9100), c: “Bacteroidia”(0.7826), | 4198 |
| | | | | | o: “Bacteroidales”(0.6730), f: “Porphyromonadaceae”(0.5182), g: Barnesiella(0.3265), | |
| | | | | | s: Barnesiella_{—}viscericola(0.2057) | |
| Ascusb_351B | 202203087 | Ascusb_351 | 99.6 | 0.48132 | d: Bacteria(1.0000), p: “Bacteroidetes”(1.0000), c: “Bacteroidia”(0.9900), | 4199 |
| | | | | | o: “Bacteroidales”(0.9801), f: “Prevotellaceae”(0.9115), g: Prevotella(0.8477), | |
| | | | | | s: Prevotella_{—}ruminicola(0.5934) | |
| Ascusb_417A | 202203087 | Ascusb_417 | 99.1 | 0.46792 | d: Bacteria(1.0000), p: “Bacteroidetes”(0.9900), c: Flavobacteriia(0.3762), | 4200 |
| | | | | | o: “Flavobacteriales”(0.1430), f: Flavobacteriaceae(0.0515), g: Maribacter(0.0062), | |
| | | | | | s: Maribacter_{—}thermophilus(0.0007) | |
| Ascusb_2003A | 202203087 | Ascusb_2003 | 99.6 | 0.62896 | d: Bacteria(1.0000), p: Firmicutes(0.8200), c: Clostridia(0.6560), | 4201 |
| | | | | | o: Clostridiales(0.5117), f: Lachnospiraceae(0.1484), g: Clostridium_XIVa(0.0282), | |
| | | | | | s: Clostridium_{—}glycyrrhizinilyticum(0.0028) | |
| Ascusb_1276A | 202203087 | Ascusb_1276 | 100 | 0.53247 | d: Bacteria(1.0000), p: “Bacteroidetes”(0.9000), c: “Bacteroidia”(0.7380), | 4202 |
| | | | | | o: “Bacteroidales”(0.6052), f: “Prevotellaceae”(0.3691), g: Prevotella(0.2252), | |
| | | | | | s: Prevotella_{—}oulorum(0.0293) | |
| Ascusb_56A | 202203087 | Ascusb_56 | 100 | 0.49473 | d: Bacteria(1.0000), p: “Bacteroidetes”(0.9700), c: “Bacteroidia”(0.9215), | 4203 |
| | | | | | o: “Bacteroidales”(0.8754), f: Bacteroidaceae(0.2189), g: Bacteroides(0.0547), | |
| | | | | | s: Bacteroides_{—}plebeius(0.0093) | |
| Ascusb_847A | 202203087 | Ascusb_847 | 97.3 | 0.67727 | d: Bacteria(1.0000), p: Firmicutes(0.9100), c: Clostridia(0.8190), | 4204 |
| | | | | | o: Clostridiales(0.7371), f: Lachnospiraceae(0.6339), g: Clostridium_XIVa(0.3106), | |
| | | | | | s: Clostridium_{—}fimetarium(0.1180) | |
| Ascusb_625A | 202203087 | Ascusb_625 | 99.6 | 0.68476 | d: Bacteria(1.0000), p: “Proteobacteria”(1.0000), c: Alphaproteobacteria(1.0000), | 4205 |
| | | | | | o: Rhizobiales(1.0000), f: Methylobacteriaceae(1.0000), g: Methylobacterium(1.0000), | |
| | | | | | s: Methylobacterium_{—}jeotgali(0.8900) | |
| Ascusb_5587B | 202203087 | Ascusb_5587 | 97.8 | 0.47371 | d: Bacteria(1.0000), p: “Bacteroidetes”(0.8100), c: “Bacteroidia”(0.5589), | 4206 |
| | | | | | o: “Bacteroidales”(0.3856), f: “Porphyromonadaceae”(0.1813), g: Butyricimonas(0.0272), | |
| | | | | | s: Butyricimonas_{—}synergistica(0.0022) | |
| Ascusb_253A | 202203087 | Ascusb_253 | 97.3 | 0.60039 | d: Bacteria(1.0000), p: “Bacteroidetes”(1.0000), c: Flavobacteriia(0.5800), | 4207 |
| | | | | | o: “Flavobacteriales”(0.3364), f: Cryomorphaceae(0.0673), g: Fluviicola(0.0067), | |
| | | | | | s: Fluviicola_{—}taffensis(0.0007) | |
| Ascusb_355A | 202203087 | Ascusb_355 | 100 | 0.47535 | d: Bacteria(1.0000), p: Firmicutes(0.9600), c: Clostridia(0.8832), | 4208 |
| | | | | | o: Clostridiales(0.8037), f: Clostridiales_Incertae_Sedis_XIII(0.4662), g: Anaerovorax(0.2517), | |
| | | | | | s: Anaerovorax_{—}odorimutans(0.1359) | |
| Ascusb_3326A | 202203087 | Ascusb_3326 | 100 | 0.75986 | d: Bacteria(1.0000), p: Firmicutes(0.4600), c: Bacilli(0.1564), | 4209 |
| | | | | | o: Bacillales(0.0297), f: Staphylococcaceae(0.0045), g: Staphylococcus(0.0006), | |
| | | | | | s: Staphylococcus_{—}rostri(0.0000) | |
| Ascusb_8129A | 202203087 | Ascusb_8129 | 99.6 | 0.8041 | d: Bacteria(1.0000), p: Firmicutes(0.5900), c: Bacilli(0.2950), | 4210 |
| | | | | | o: Lactobacillobacillaceae(0.0142), g: Lactobacillus(0.0028), | |
| | | | | | s: Lactobacillus_{—}manihotivorans(0.0002) | |
| Ascusb_1040A | 202203087 | Ascusb_1040 | 99.1 | 0.60345 | d: Bacteria(1.0000), p: “Bacteroidetes”(0.1500), c: “Bacteroidia”(0.0225), | 4211 |
| | | | | | o: “Bacteroidales”(0.0034), f: Bacteroidaceae(0.0005), g: Anaerorhabdus(0.0001), | |
| | | | | | s: Anaerorhabdus_{—}furcosa(0.0000) | |
| Ascusb_4420B | 202203087 | Ascusb_4420 | 98.7 | 0.46209 | d: Bacteria(1.0000), p: Firmicutes(0.9300), c: Clostridia(0.7719), | 4212 |
| | | | | | o: Clostridiales(0.6407), f: Ruminococcaceae(0.1474), g: Clostridium_IV(0.0251), | |
| | | | | | s: Clostridium_{—}leptum(0.0033) | |
| Ascusb_7814A | 202203087 | Ascusb_7814 | 98.7 | 0.43294 | d: Bacteria(1.0000), p: “Bacteroidetes”(1.0000), c: “Bacteroidia”(0.9800), | 4213 |
| | | | | | o: “Bacteroidales”(0.9604), f: Bacteroidaceae(0.9412), g: Bacteroides(0.9224), | |
| | | | | | s: Bacteroides_{—}uniformis(0.3413) | |
| Ascusb_544A | 202203087 | Ascusb_544 | 97.3 | 0.4311 | d: Bacteria(1.0000), p: “Bacteroidetes”(1.0000), c: “Bacteroidia”(1.0000), | 4214 |
| | | | | | o: “Bacteroidales”(1.0000), f: “Prevotellaceae”(0.8500), g: Prevotella(0.7225), | |
| | | | | | s: Prevotella_{—}ruminicola(0.5346) | |
| Ascusb_3868A | 202203087 | Ascusb_3868 | 99.6 | 0.45317 | d: Bacteria(1.0000), p: “Bacteroidetes”(1.0000), c: “Bacteroidia”(0.9600), | 4215 |
| | | | | | o: “Bacteroidales”(0.9216), f: Bacteroidaceae(0.8387), g: Bacteroides(0.7632), | |
| | | | | | s: Bacteroides_{—}coprocola(0.2518) | |
| Ascusb_2413A | 202203087 | Ascusb_2413 | 99.1 | 0.59409 | d: Bacteria(1.0000), p: “Bacteroidetes”(1.0000), c: “Bacteroidia”(0.9600), | 4216 |
| | | | | | o: “Bacteroidales”(0.9216), f: Bacteroidaceae(0.8479), g: Bacteroides(0.7800), | |
| | | | | | s: Bacteroides_{—}coprocola(0.2886) | |
| Ascusb_9933A | 202203087 | Ascusb_9933 | 98.7 | 0.60831 | d: Bacteria(1.0000), p: “Bacteroidetes”(1.0000), c: “Bacteroidia”(0.9800), | 4217 |
| | | | | | o: “Bacteroidales”(0.9604), f: Bacteroidaceae(0.9220), g: Bacteroides(0.8851), | |
| | | | | | s: Bacteroides_{—}coprocola(0.3009) | |
| Ascusb_17128B | 202203087 | Ascusb_17128 | 97.8 | 0.53035 | d: Bacteria(1.0000), p: “Bacteroidetes”(1.0000), c: “Bacteroidia”(0.9900), | 4218 |
| | | | | | o: “Bacteroidales”(0.9801), f: “Prevotellaceae”(0.9605), g: Prevotella(0.9413), | |
| | | | | | s: Prevotella_{—}brevis(0.8283) | |
| Ascusb_57B | 202203087 | Ascusb_57 | 97.8 | 0.51727 | d: Bacteria(1.0000), p: “Bacteroidetes”(1.0000), c: “Bacteroidia”(1.0000), | 4219 |
| | | | | | o: “Bacteroidales”(1.0000), f: “Prevotellaceae”(0.9800), g: Prevotella(0.9604), | |
| | | | | | s: Prevotella_{—}brevis(0.8548) | |
| Ascusb_136A | 202203087 | Ascusb_136 | 98.7 | 0.52655 | d: Bacteria(1.0000), p: “Bacteroidetes”(1.0000), c: “Bacteroidia”(1.0000), | 4220 |
| | | | | | o: “Bacteroidales”(1.0000), f: “Prevotellaceae”(0.9200), g: Prevotella(0.8464), | |
| | | | | | s: Prevotella_{—}brevis(0.5078) | |
| Ascusb_6424B | 202203087 | Ascusb_6424 | 97.8 | 0.54457 | d: Bacteria(1.0000), p: “Bacteroidetes”(0.9000), c: “Bacteroidia”(0.6390), | 4221 |
| | | | | | o: “Bacteroidales”(0.4537), f: “Porphyromonadaceae”(0.2495), g: Barnesiella(0.0599), | |
| | | | | | s: Barnesiella_{—}viscericola(0.0120) | |
| Ascusb_375C | 202203087 | Ascusb_375 | 100 | 0.55878 | d: Bacteria(1.0000), p: Firmicutes(0.9500), c: Clostridia(0.8930), | 4222 |
| | | | | | o: Clostridiales(0.8394), f: Lachnospiraceae(0.7471), g: Lachnospiracea_{—}incertae_{—}sedis(0.2764) | |
| Ascusb_619A | 202203087 | Ascusb_619 | 97.3 | 0.52631 | d: Bacteria(1.0000), p: “Bacteroidetes”(1.0000), c: “Bacteroidia”(1.0000), | 4223 |
| | | | | | o: “Bacteroidales”(1.0000), f: “Prevotellaceae”(08100), g: Prevotella(0.6561), | |
| | | | | | s: Prevotella_{—}brevis(0.4396) | |
| Ascusb_143A | 202203087 | Ascusb_143 | 100 | 0.50894 | d: Bacteria(1.0000), p: Firmicutes(0.7400), c: Clostridia(0.5254), | 4224 |
| | | | | | o: Clostridiales(0.3573), f: Ruminococcaceae(0.1143), g: Hydrogenoanaerobacterium(0.0103), | |
| | | | | | s: Hydrogenoanaerobacteriums_{—}accharovorans(0.0009) | |
| Ascusb_318B | 202203087 | Ascusb_318 | 99.1 | 0.74628 | d: Bacteria(1.0000), p: “Tenericutes”(0.6400), c: Mollicutes(04096), | 4225 |
| | | | | | o: Anaeroplasmatales(0.2048), f: Anaeroplasmataceae(0.1024), g: Anaeroplasma(0.0512), | |
| | | | | | s: Anaeroplasma_{—}varium(0.0128) | |
| Ascusb_2432B | 202203087 | Ascusb_2432 | 100 | 0.47083 | d: Bacteria(1.0000), p: “Proteobacteria”(0.8600), c: Alphaproteobacteria(0.5934), | 4226 |
| | | | | | o: Rhizobiales(0.3264), f: Beijerinckiaceae(0.1240), g: Methylocella(0.0236), | |
| | | | | | s: Methylocella_{—}tundrae(0.0045) | |
| Ascusb_2775A | 202203087 | Ascusb_2775 | 99.1 | 0.61732 | d: Bacteria(1.0000), p: “Bacteroidetes”(0.8900), c: “Bacteroidia”(0.4183), | 4227 |
| | | | | | o: “Bacteroidales”(0.1966), f: “Porphyromonadaceae”(0.0767), g: Parabacteroides(0.0199), | |
| | | | | | s: Parabacteroides_{—}distasonis(0.0032) | |
| Ascusb_7077B | 202203087 | Ascusb_7077 | 97.8 | 0.55138 | d: Bacteria(1.0000), p: “Bacteroidetes”(0.7400), c: “Bacteroidia”(0.3034), | 4228 |
| | | | | | o: “Bacteroidales”(0.1244), f: “Porphyromonadaceae”(0.0435), g: Parabacteroides(0.0100), | |
| | | | | | s: Parabacteroides_{—}distasonis(0.0013) | |
| Ascusb_2569A | 202203087 | Ascusb_2569 | 97.8 | 0.58147 | d: Bacteria(1.0000), p: “Bacteroidetes”(1.0000), c: “Bacteroidia”(1.0000), | 4229 |
| | | | | | o: “Bacteroidales”(1.0000), f: “Prevotellaceae”(0.9300), g: Prevotella(0.8649), | |
| | | | | | s: Prevotella_{—}ruminicola(0.6573) | |
| Ascusb_1508A | 202203087 | Ascusb_1508 | 99.6 | 0.48126 | d: Bacteria(1.0000), p: “Tenericutes”(0.6400), c: Mollicutes(04096), | 4230 |
| | | | | | o: Entomoplasmatales(0.1884), f: Spiroplasmataceae(0.0565), g: Spiroplasma(0.0170), | |
| | | | | | s: Spiroplasma_{—}taiwanense(0.0020) | |
| Ascusb_2381B | 202203087 | Ascusb_2381 | 99.6 | 0.61873 | d: Bacteria(1.0000), p: “Tenericutes”(0.2600), c: Mollicutes(0.0676), | 4231 |
| | | | | | o: Entomoplasmatales(0.0128), f: Spiroplasmataceae(0.0024), g: Spiroplasma(0.0005), | |
| | | | | | s: Spiroplasma_{—}taiwanense(0.0000) | |
| Ascusb_16891B | 202203087 | Ascusb_16891 | 98.7 | 0.44944 | d: Bacteria(1.0000), p: “Bacteroidetes”(0.9900), c: Flavobacteriia(0.4356), | 4232 |
| | | | | | o: “Flavobacteriales”(0.1917), f: Flavobacteriaceae(0.0805), g: Salinimicrobium(0.0113), | |
| | | | | | s: Salinimicrobium_{—}catena(0.0011) | |
| Ascusb_2446A | 202203087 | Ascusb_2446 | 97.8 | 0.61151 | d: Bacteria(1.0000), p: “Bacteroidetes”(1.0000), c: “Bacteroidia”(0.9200), | 4233 |
| | | | | | o: “Bacteroidales”(0.8464), f: “Prevotellaceae”(0.7702), g: Prevotella(0.7009), | |
| | | | | | s: Prevotella_{—}brevis(0.6308) | |
| Ascusb_75A | 202203087 | Ascusb_75 | 99.6 | 0.67451 | d: Bacteria(1.0000), p: Firmicutes(0.9600), c: Clostridia(0.7872), | 4234 |
| | | | | | o: Clostridiales(0.6455), f: Ruminococcaceae(0.3679), g: Ruminococcus(0.1067), | |
| | | | | | s: Ruminococcus_{—}bromii(0.0309) | |
| Ascusb_75B | 202203086 | Ascusb_75 | 100 | 0.67451 | d: Bacteria(1.0000), p: Firmicutes(0.9981), c: Clostridia(0.9378), | 4235 |
| | | | | | o: Clostridiales(0.8704), f: Ruminococcaceae(0.7407), g: Ruminococcus(0.4222) | |
| Ascusb_1195A | 202203087 | Ascusb_1195 | 99.1 | 0.56799 | d: Bacteria(1.0000), p: Firmicutes(0.9000), c: Clostridia(0.7830), | 4236 |
| | | | | | o: Clostridiales(0.6812), f: Clostridiales_Incertae_SedisXII(0.2384), g: Fusibacter(0.0811), | |
| | | | | | s: Fusibacter_{—}paucivorans(0.0259) | |
| Ascusb_725B | 202203087 | Ascusb_725 | 99.1 | 0.50013 | d: Bacteria(1.0000), p: “Bacteroidetes”(1.0000), c: “Bacteroidia”(1.0000), | 4237 |
| | | | | | o: “Bacteroidales”(1.0000), f: “Prevotellaceae”(0.9400), g: Prevotella(0.8836), | |
| | | | | | s: Prevotella_{—}brevis(0.7952) | |
| Ascusb_1253A | 202203087 | Ascusb_1253 | 98.7 | 0.75965 | d: Bacteria(1.0000), p: “Bacteroidetes”(1.0000), c: Flavobacteriia(0.7000), | 4238 |
| | | | | | o: “Flavobacteriales”(0.4900), f: Flavobacteriaceae(0.3136), g: Zunongwangia(0.0627), | |
| | | | | | s: Zunongwangia_{—}mangrovi(0.0119) | |
| Ascusb_112B | 202203087 | Ascusb_112 | 100 | 0.5635 | d: Bacteria(1.0000), p: “Synergistetes”(0.1300), c: Synergistia(0.0169), | 4239 |
| | | | | | o: Synergistales(0.0022), f: Synergistaceae(0.0003), g: Aminiphilus(0.0000), | |
| | | | | | s: Aminiphilus_{—}circumscriptus(0.0000) | |
| Ascusb_81A | 202203087 | Ascusb_81 | 97.8 | 0.76787 | d: Bacteria(1.0000), p: Firmicutes(0.8700), c: Clostridia(0.7482), | 4240 |
| | | | | | o: Clostridiales(0.6435), f: Ruminococcaceae(0.4633), g: Hydrogenoanaerobacterium(0.1992), | |
| | | | | | s: Hydrogenoanaerobacterium_{—}saccharovorans(0.0857) | |
| Ascusb_4736B | 202203087 | Ascusb_4736 | 100 | 0.57685 | d: Bacteria(1.0000), p: “Bacteroidetes”(0.9700), c: “Bacteroidia”(0.9215), | 4241 |
| | | | | | o: “Bacteroidales”(0.8754), f: Bacteroidaceae(0.4465), g: Bacteroides(0.2277), | |
| | | | | | s: Bacteroides_{—}coprophilus(0.0455) | |
| Ascusb_1630B | 202203087 | Ascusb_1630 | 99.1 | 0.51231 | d: Bacteria(1.0000), p: “Bacteroidetes”(1.0000), c: “Bacteroidia”(1.0000), | 4242 |
| | | | | | o: “Bacteroidales”(1.0000), f: “Prevotellaceae”(0.7800), g: Prevotella(0.6084), | |
| | | | | | s: Prevotella_{—}brevis(0.3955) | |
| Ascusb_2754A | 202203087 | Ascusb_2754 | 100 | 0.57908 | d: Bacteria(1.0000), p: “Bacteroidetes”(0.9600), c: Flavobacteriia(0.5856), | 4243 |
| | | | | | o: “Flavobacteriales”(0.3572), f: Flavobacteriaceae(0.2036), g: Lutibacter(0.0204), | |
| | | | | | s: Lutibacter_{—}flavus(0.0020) | |
| Ascusb_9379A | 202203087 | Ascusb_9379 | 97.3 | 0.46075 | d: Bacteria(1.0000), p: “Bacteroidetes”(1.0000), c: Flavobacteriia(0.6000), | 4244 |
| | | | | | o: “Flavobacteriales”(0.3600), f: Flavobacteriaceae(0.2088), g: Maribacter(0.0418), | |
| | | | | | s: Maribacter_{—}thermophilus(0.0063) | |
| Ascusb_2786B | 202203087 | Ascusb_2786 | 97.3 | 0.6298 | d: Bacteria(1.0000), p: “Bacteroidetes”(0.9400), c: Flavobacteriia(0.5264), | 4245 |
| | | | | | o: “Flavobacteriales”(0.2948), f: Flavobacteriaceae(0.1474), g: Lutibacter(0.0147), | |
| | | | | | s: Lutibacter_{—}flavus(0.0015) | |
| Ascusb_7910A | 202203087 | Ascusb_7910 | 99.6 | 0.49388 | d: Bacteria(1.0000), p: “Bacteroidetes”(1.0000), c: Flavobacteriia(0.5700), | 4246 |
| | | | | | o: “Flavobacteriales”(0.3249), f: Flavobacteriaceae(0.1722), g: Maribacter(0.0499), | |
| | | | | | s: Maribacter_{—}thermophilus(0.0135) | |
| Ascusb_328A | 202203087 | Ascusb_328 | 98.2 | 0.83886 | d: Bacteria(1.0000), p: Candidatus_Saccharibacteria(0.8000), | 4247 |
| | | | | | g: Saccharibacteria_{—}generaincertae_{—}sedis(0.6400) | |
| Ascusb_471A | 202203087 | Ascusb_471 | 99.6 | 0.45161 | d: Bacteria(1.0000), p: “Bacteroidetes”(0.9800), c: “Bacteroidia”(0.9604), | 4248 |
| | | | | | o: “Bacteroidales”(0.9412), f: “Prevotellaceae”(0.7624), g: Prevotella(0.6175), | |
| | | | | | s: Prevotella_{—}aurantiaca(0.1297) | |
| Ascusb_3264C | 202203087 | Ascusb_3264 | 99.1 | 0.63261 | d: Bacteria(1.0000), p: “Bacteroidetes”(1.0000), c: “Bacteroidia”(1.0000), | 4249 |
| | | | | | o: “Bacteroidales”(1.0000), f: Bacteroidaceae(0.9900), g: Bacteroides(0.9801), | |
| | | | | | s: Bacteroides_{—}uniformis(0.4900) | |
| Ascusb_20A | 202203087 | Ascusb_20 | 99.6 | 0.44888 | d: Bacteria(1.0000), p: Firmicutes(0.7000), c: Clostridia(0.3500), | 4250 |
| | | | | | o: Clostridiales(0.1680), f: Lachnospiraceae(0.0437), g: Clostridium_XIVa(0.0066), | |
| | | | | | s: Clostridium_{—}aminophilum(0.0007) | |
| Ascusb_1715B | 202203087 | Ascusb_1715 | 99.6 | 0.53111 | d: Bacteria(1.0000), p: “Bacteroidetes”(1.0000), c: “Bacteroidia”(1.0000), | 4251 |
| | | | | | o: “Bacteroidales”(1.0000), f: “Prevotellaceae”(0.9600), g: Prevotella(0.9216), | |
| | | | | | s: Prevotella_{—}brevis(0.8663) | |
| Ascusb_1291A | 202203087 | Ascusb_1291 | 98.7 | 0.52988 | d: Bacteria(1.0000), p: Firmicutes(0.5100), c: Clostridia(0.1377), | 4252 |
| | | | | | o: Natranaerobiales(0.0069), f: Natranaerobiaceae(0.0003), g: Natranaerobaculum(0.0000), | |
| | | | | | s: Natranaerobaculum_{—}magadiense(0.0000) | |
| Ascusb_1161A | 202203087 | Ascusb_1161 | 99.6 | 0.497 | d: Bacteria(1.0000), p: Firmicutes(0.8700), c: Erysipelotrichia(0.6090), | 4253 |
| | | | | | o: Erysipelotrichales(0.4263), f: Erysipelotrichaceae(0.2984), g: Solobacterium(0.1194), | |
| | | | | | s: Solobacterium_{—}moorei(0.0477) | |
| Ascusb_20052C | 202203087 | Ascusb_20052 | 98.2 | 0.48834 | d: Bacteria(1.0000), p: “Bacteroidetes”(0.9900), c: “Bacteroidia”(0.9702), | 4254 |
| | | | | | o: “Bacteroidales”(0.9508), f: “Prevotellaceae”(0.9128), g: Prevotella(0.8763), | |
| | | | | | s: Prevotella_{—}brevis(0.5871) | |
| Ascusb_2341B | 202203087 | Ascusb_2341 | 97.3 | 0.67832 | d: Bacteria(1.0000), p: “Bacteroidetes”(1.0000), c: “Bacteroidia”(1.0000), | 4255 |
| | | | | | o: “Bacteroidales”(1.0000), f: “Prevotellaceae”(1.0000), g: Prevotella(1.0000), | |
| | | | | | s: Prevotella_{—}brevis(1.0000) | |
| Ascusb_403A | 202203087 | Ascusb_403 | 98.7 | 0.58802 | d: Bacteria(1.0000), p: Firmicutes(0.8600), c: Clostridia(0.7138), | 4256 |
| | | | | | o: Clostridiales(0.5925), f: Lachnospiraceae(0.1600), g: Cellulosilyticum(0.0272), | |
| | | | | | s: Cellulosilyticum_{—}ruminicola(0.0046) | |
| Ascusb_170A | 202203087 | Ascusb_170 | 98.2 | 0.73783 | d: Bacteria(1.0000), p: Firmicutes(0.8100), c: Clostridia(0.6399), | 4257 |
| | | | | | o: Clostridiales(0.5055), f: Ruminococcaceae(0.1668), g: Sporobacter(0.0234), | |
| | | | | | s: Sporobacter_{—}termitidis(0.0033) | |
| Ascusb_360A | 202203087 | Ascusb_360 | 99.6 | 0.67289 | d: Bacteria(1.0000), p: Firmicutes(0.8400), c: Clostridia(0.6804), | 4258 |
| | | | | | o: Clostridiales(0.5511), f: Ruminococcaceae(0.3693), g: Hydrogenoanaerobacterium(0.2031), | |
| | | | | | s: Hydrogenoanaerobacterium_{—}saccharovorans(0.1117) | |
| Ascusb_2442A | 202203087 | Ascusb_2442 | 97.8 | 0.5696 | d: Bacteria(1.0000), p: Cyanobacteria/Chloroplast(0.2800), c: Cyanobacteria(0.0504), | 4259 |
| | | | | | f: Family_XII(0.0066), g: GpXII(0.0009) | |
| Ascusb_15659A | 202203087 | Ascusb_15659 | 99.6 | 0.44483 | d: Bacteria(1.0000), p: “Bacteroidetes”(0.9800), c: “Bacteroidia”(0.6272), | 4260 |
| | | | | | o: “Bacteroidales”(0.4014), f: Bacteroidaceae(0.1285), g: Bacteroides(0.0411), | |
| | | | | | s: Bacteroides_{—}barnesiae(0.0107) | |
| Ascusb_93A | 202203086 | Ascusb_93 | 98.7 | 0.57028 | d: Bacteria(1.0000), p: Firmicutes(0.8400), c: Clostridia(0.6804), | 4261 |
| | | | | | o: Clostridiales(0.5443), f: Ruminococcaceae(0.2123), g: Clostridium_IV(0.0318), | |
| | | | | | s: Eubacterium_{—}siraeum(0.0041) | |
| Ascusb_619B | 202203086 | Ascusb_619 | 99.6 | 0.52631 | d: Bacteria(1.0000), p: “Bacteroidetes”(1.0000), c: “Bacteroidia”(1.0000), | 4262 |
| | | | | | o: “Bacteroidales”(1.0000), f: “Prevotellaceae”(0.8100), g: Prevotella(0.6561), | |
| | | | | | s: Prevotella_{—}brevis(0.4396) | |
| Ascusb_447A | 202203086 | Ascusb_447 | 99.6 | 0.67517 | d: Bacteria(1.0000), p: Firmicutes(0.9000), c: Clostridia(0.7290), | 4263 |
| | | | | | o: Clostridiales(0.5832), f: Ruminococcaceae(0.2683), g: Hydrogenoanaerobacterium(0.0590), | |
| | | | | | s: Hydrogenoanaerobacterium_{—}saccharovorans(0.0130) | |
| Ascusb_1187B | 202203086 | Ascusb_1187 | 97.8 | 0.50709 | d: Bacteria(1.0000), p: Firmicutes(0.6600), c: Clostridia(0.3564), | 4264 |
| | | | | | o: Clostridiales(0.1889), f: Lachnospiraceae(0.0510), g: Lachnospiracea_{—}incertae_{—}sedis(0.0087), | |
| | | | | | s: Eubacterium_{—}hallii(0.0013) | |
| Ascusb_19172C | 202203086 | Ascusb_19172 | 98.2 | 0.49061 | d: Bacteria(1.0000), p: “Bacteroidetes”(0.9300), c: “Bacteroidia”(0.7812), | 4265 |
| | | | | | o: “Bacteroidales”(0.6562), f: “Porphyromonadaceae”(0.4790), g: Barnesiella(0.2826), | |
| | | | | | s: Barnesiella_{—}viscericola(0.1668) | |
| Ascusb_3031B | 202203086 | Ascusb_3031 | 97.8 | 0.47916 | d: Bacteria(1.0000), p: “Bacteroidetes”(0.9100), c: “Bacteroidia”(0.7826), | 4266 |
| | | | | | o: “Bacteroidales”(0.6730), f: “Porphyromonadaceae”(0.5182), g: Barnesiella(0.3265), | |
| | | | | | s: Barnesiella_{—}viscericola(0.2057) | |
| Ascusb_8619B | 202203086 | Ascusb_8619 | 100 | 0.47372 | d: Bacteria(1.0000), p: “Spirochaetes”(0.9000), c: Spirochaetia(0.8100), | 4267 |
| | | | | | o: Spirochaetales(0.7290), f: Spirochaetaceae(0.6561), g: Treponema(0.5839), | |
| | | | | | s: Treponema_{—}bryantii(0.3095) | |
| Ascusb_4126B | 202203086 | Ascusb_4126 | 99.6 | 0.45512 | d: Bacteria(1.0000), p: “Bacteroidetes”(0.9800), c: “Bacteroidia”(0.1960), | 4268 |
| | | | | | o: “Bacteroidales”(0.0392), f: Marinilabiliaceae(0.0055), g: Saccharicrinis(0.0005), | |
| | | | | | s: Saccharicrinis_{—}fermentans(0.0000) | |
| Ascusb_363B | 202203086 | Ascusb_363 | 97.8 | 0.69084 | d: Bacteria(1.0000), p: “Tenericutes”(1.0000), c: Mollicutes(1.0000), | 4269 |
| | | | | | o: Anaeroplasmatales(1.0000), f: Anaeroplasmataceae(1.0000), g: Anaeroplasma(1.0000), | |
| | | | | | s: Anaeroplasma_{—}varium(0.9100) | |
| Ascusb_9477B | 202203086 | Ascusb_9477 | 98.7 | 0.44712 | d: Bacteria(1.0000), p: “Bacteroidetes”(0.9600), c: “Bacteroidia”(0.3840), | 4270 |
| | | | | | o: “Bacteroidales”(0.1536), f: “Porphyromonadaceae”(0.0369), g: Parabacteroides(0.0070), | |
| | | | | | s: Parabacteroides_{—}distasonis(0.0013) | |
| Ascusb_4760B | 202203086 | Ascusb_4760 | 98.7 | 0.58499 | d: Bacteria(1.0000), p: “Bacteroidetes”(0.9900), c: “Bacteroidia”(0.4653), | 4271 |
| | | | | | o: “Bacteroidales”(0.2187), f: “Porphyromonadaceae”(0.0700), g: Parabacteroides(0.0189), | |
| | | | | | s: Parabacteroides_{—}distasonis(0.0049) | |
| Ascusb_1942A | 202203086 | Ascusb_1942 | 99.6 | 0.68533 | d: Bacteria(1.0000), p: Firmicutes(0.9600), c: Clostridia(0.8928), | 4272 |
| | | | | | o: Clostridiales(0.8303), f: Ruminococcaceae(0.5231), g: Acetanaerobacterium(0.1098), | |
| | | | | | s: Acetanaerobacteriumelongatum(0.0231) | |
| Ascusb_2865A | 202203086 | Ascusb_2865 | 98.2 | 0.51447 | d: Bacteria(1.0000), p: Firmicutes(0.9600), c: Clostridia(0.8544), | 4273 |
| | | | | | o: Clostridiales(0.7604), f: Ruminococcaceae(0.3650), g: Clostridium_IV(0.1095), | |
| | | | | | s: Clostridium_{—}methylpentosum(00263) | |
| Ascusb_3077A | 202203086 | Ascusb_3077 | 98.2 | 0.55892 | d: Bacteria(1.0000), p: Firmicutes(0.9800), c: Clostridia(0.8918), | 4274 |
| | | | | | o: Clostridiales(0.8115), f: Ruminococcaceae(0.5113), g: Acetanaerobacterium(0.1483), | |
| | | | | | s: Acetanaerobacterium_{—}elongatum(0.0430) | |
| Ascusb_9020C | 202203086 | Ascusb_9020 | 98.7 | 0.4462 | d: Bacteria(1.0000), p: “Bacteroidetes”(0.9600), c: “Bacteroidia”(0.8928), | 4275 |
| | | | | | o: “Bacteroidales”(0.8303), f: “Prevotellaceae”(0.3404), g: Prevotella(0.1260), | |
| | | | | | s: Prevotella_{—}albensis(0.0277) | |
| Ascusb_5387B | 202203086 | Ascusb_5387 | 99.6 | 0.83068 | d: Bacteria(1.0000), p: Firmicutes(0.9300), c: Clostridia(0.6789), | 4276 |
| | | | | | o: Clostridiales(0.4956), f: Ruminococcaceae(0.2329), g: Clostridium_IV(0.1002), | |
| | | | | | s: Clostridium_{—}leptum(0.0421) | |
| Ascusb_233B | 202203086 | Ascusb_233 | 98.7 | 0.77468 | d: Bacteria(1.0000), p: Firmicutes(0.9200), c: Clostridia(0.7544), | 4277 |
| | | | | | o: Clostridiales(0.6111), f: Ruminococcaceae(0.2689), g: Clostridium_IV(0.1075), | |
| | | | | | s: Clostridium_{—}leptum(0.0430) | |
| Ascusb_1104A | 202203086 | Ascusb_1104 | 100 | 0.78453 | d: Bacteria(1.0000), p: “Spirochaetes”(0.8900), c: Spirochaetia(0.7921), | 4278 |
| | | | | | o: Spirochaetales(0.7050), f: Spirochaetaceae(0.6274), g: Treponema(0.5270), | |
| | | | | | s: Treponema_{—}pectinovorum(0.2319) | |
| Ascusb_301C | 202203086 | Ascusb_301 | 100 | 0.47494 | d: Bacteria(1.0000), p: “Bacteroidetes”(1.0000), c: “Bacteroidia”(0.9500), | 4279 |
| | | | | | o: “Bacteroidales”(0.9025), f: “Prevotellaceae”(06498), g: Prevotella(0.4549), | |
| | | | | | s: Prevotella_{—}brevis(0.2138) | |
| Ascusb_294A | 202203086 | Ascusb_294 | 99.1 | 0.6153 | d: Bacteria(1.0000), p: “Chloroflexi”(0.4000), c: Anaerolineae(0.1600), | 4280 |
| | | | | | o: Anaerolineales(0.0640), f: Anaerolineaceae(0.0256), g: Ornatilinea(0.0067), | |
| | | | | | s: Ornatilinea_{—}apprima(0.0017) | |
| Ascusb_1549B | 202203086 | Ascusb_1549 | 98.7 | 0.49162 | d: Bacteria(1.0000), p: “Bacteroidetes”(0.9800), c: “Bacteroidia”(0.9114), | 4281 |
| | | | | | o: “Bacteroidales”(0.8476), f: “Prevotellaceae”(0.3475), g: Prevotella(0.1321), | |
| | | | | | s: Prevotella_{—}oulorum(0.0370) | |
| Ascusb_328B | 202203086 | Ascusb_328 | 99.6 | 0.83886 | d: Bacteria(1.0000), p: Candidatus_Saccharibacteria(0.8000), | 4282 |
| | | | | | g: Saccharibacteria_{—}genera_{—}incertae_{—}sedis(0.6400) | |
| Ascusb_351C | 202203086 | Ascusb_351 | 100 | 0.48132 | d: Bacteria(1.0000), p: “Bacteroidetes”(1.0000), c: “Bacteroidia”(0.9900), | 4283 |
| | | | | | o: “Bacteroidales”(0.9801), f: “Prevotellaceae”(0.9115), g: Prevotella(0.8477), | |
| | | | | | s: Prevotella_{—}ruminicola(0.5934) | |
| Ascusb_2220A | 202203086 | Ascusb_2220 | 97.3 | 0.67782 | d: Bacteria(1.0000), p: Firmicutes(0.9800), c: Clostridia(0.9604), | 4284 |
| | | | | | o: Clostridiales(0.9316), f: Lachnospiraceae(0.8477), g: Lachnospiracea_{—}incertae_{—}sedis(0.2458), | |
| | | | | | s: Eubacterium_{—}ruminantium(0.0688) | |
| Ascusb_16089A | 202203086 | Ascusb_16089 | 97.3 | 0.45036 | d: Bacteria(1.0000), p: Firmicutes(0.9900), c: Clostridia(0.9702), | 4285 |
| | | | | | o: Clostridiales(0.9508), f: Lachnospiraceae(0.9223), g: Butyrivibrio(0.5441), | |
| | | | | | s: Butyrivibrio_{—}hungatei(0.1687) | |
| Ascusb_489C | 202203086 | Ascusb_489 | 99.1 | 0.45079 | d: Bacteria(1.0000), p: “Bacteroidetes”(1.0000), c: “Bacteroidia”(0.2400), | 4286 |
| | | | | | o: “Bacteroidales”(0.0576), f: “Rikenellaceae”(0.0063), g: Alistipes(0.0007), | |
| | | | | | s: Alistipesfinegoldii(0.0001) | |
| Ascusb_1224B | 202203086 | Ascusb_1224 | 99.6 | 0.61668 | d: Bacteria(1.0000), p: Firmicutes(0.9800), c: Clostridia(0.9604), | 4287 |
| | | | | | o: Clostridiales(0.9412), f: Lachnospiraceae(0.8188), g: Clostridium_XIVa(0.3930), | |
| | | | | | s: Clostridium_{—}xylanovorans(0.1494) | |
| Ascusb_56B | 202203086 | Ascusb_56 | 98.7 | 0.49473 | d: Bacteria(1.0000), p: “Bacteroidetes”(0.9700), c: “Bacteroidia”(0.9215), | 4288 |
| | | | | | o: “Bacteroidales”(0.8754), f: Bacteroidaceae(0.2189), g: Bacteroides(0.0547), | |
| | | | | | s: Bacteroides_{—}plebeius(0.0093) | |
| Ascusb_12149B | 202203086 | Ascusb_12149 | 97.8 | 0.56358 | d: Bacteria(1.0000), p: Firmicutes(1.0000), c: Clostridia(1.0000), | 4289 |
| | | | | | o: Clostridiales(1.0000), f: Lachnospiraceae(0.9900), g: Lachnoanaerobaculum(0.5346), | |
| | | | | | s: Lachnoanaerobaculum_{—}orale(0.2352) | |
| Ascusb_701A | 202203086 | Ascusb_701 | 98.7 | 0.57025 | d: Bacteria(1.0000), p: “Bacteroidetes”(1.0000), c: Flavobacteriia(0.6200), | 4290 |
| | | | | | o: “Flavobacteriales”(0.3844), f: Cryomorphaceae(0.1345), g: Wandonia(0.0431), | |
| | | | | | s: Wandonia_{—}haliotis(0.0138) | |
| Ascusb_3805B | 202203086 | Ascusb_3805 | 99.6 | 0.53943 | d: Bacteria(1.0000), p: “Bacteroidetes”(0.9800), c: Flavobacteriia(0.5978), | 4291 |
| | | | | | o: “Flavobacteriales”(0.3647), f: Cryomorphaceae(0.1058), g: Wandonia(0.0222), | |
| | | | | | s: Wandonia_{—}haliotis(0.0047) | |
| Ascusb_13271C | 202203086 | Ascusb_13271 | 97.8 | 0.83405 | d: Bacteria(1.0000), p: Firmicutes(0.8800), c: Clostridia(0.6864), | 4292 |
| | | | | | o: Clostridiales(0.5217), f: Lachnospiraceae(0.1930), g: Roseburia(0.0386), | |
| | | | | | s: Roseburia_{—}hominis(0.0050) | |
| Ascusb_2017B | 202203086 | Ascusb_2017 | 98.2 | 0.55244 | d: Bacteria(1.0000), p: “Bacteroidetes”(1.0000), c: “Bacteroidia”(1.0000), | 4293 |
| | | | | | o: “Bacteroidales”(1.0000), f: “Prevotellaceae”(0.9300), g: Prevotella(0.8649), | |
| | | | | | s: Prevotella_{—}ruminicola(0.6919) | |
| Ascusb_3981A | 202203086 | Ascusb_3981 | 98.2 | 0.53578 | d: Bacteria(1.0000), p: Firmicutes(0.8900), c: Clostridia(0.7476), | 4294 |
| | | | | | o: Clostridiales(0.6205), f: Christensenellaceae(0.1924), g: Christensenella(0.0596), | |
| | | | | | s: Christensenella_{—}minuta(0.0185) | |
| Ascusb_4041A | 202203086 | Ascusb_4041 | 97.3 | 0.51359 | d: Bacteria(1.0000), p: Firmicutes(0.8600), c: Clostridia(0.7052), | 4295 |
| | | | | | o: Clostridiales(0.5783), f: Christensenellaceae(0.1561), g: Christensenella(0.0422), | |
| | | | | | s: Christensenella_{—}minuta(0.0114) | |
| Ascusb_1179D | 202203086 | Ascusb_1179 | 99.1 | 0.57688 | d: Bacteria(1.0000), p: “Fibrobacteres”(1.0000), c: “Fibrobacteria”(1.0000), | 4296 |
| | | | | | o: “Fibrobacterales”(1.0000), f: “Fibrobacteraceae”(1.0000), g: Fibrobacter(1.0000), | |
| | | | | | s: Fibrobacter_{—}succinogenes_subsp._elongatus(0.8000) | |
| Ascusb_534C | 202203086 | Ascusb_534 | 99.1 | 0.55524 | d: Bacteria(1.0000), p: “Fibrobacteres”(1.0000), c: “Fibrobacteria”(1.0000), | 4297 |
| | | | | | o: “Fibrobacterales”(1.0000), f: “Fibrobacteraceae”(1.0000), g: Fibrobacter(1.0000), | |
| | | | | | s: Fibrobacter_{—}succinogenes_subsp._elongatus(0.9300) | |
| Ascusb_16442B | 202203086 | Ascusb_16442 | 98.7 | 0.51147 | d: Bacteria(1.0000), p: “Fibrobacteres”(1.0000), c: “Fibrobacteria”(1.0000), | 4298 |
| | | | | | o: “Fibrobacterales”(1.0000), f: “Fibrobacteraceae”(1.0000), g: Fibrobacter(1.0000), | |
| | | | | | s: Fibrobacter_{—}succinogenes_subsp._elongatus(0.7700) | |
| Ascusb_1287A | 202203086 | Ascusb_1287 | 97.3 | 0.47014 | d: Bacteria(1.0000), p: “Fibrobacteres”(1.0000), c: “Fibrobacteria”(1.0000), | 4299 |
| | | | | | o: “Fibrobacterales”(1.0000), f: “Fibrobacteraceae”(1.0000), g: Fibrobacter(1.0000), | |
| | | | | | s: Fibrobacter_{—}succinogenes_subsp._succinogenes(0.7800) | |
| Ascusb_1508B | 202203086 | Ascusb_1508 | 100 | 0.48126 | d: Bacteria(1.0000), p: “Tenericutes”(0.6400), c: Mollicutes(0.4096), | 4300 |
| | | | | | o: Entomoplasmatales(0.1884), f: Spiroplasmataceae(0.0565), g: Spiroplasma(0.0170), | |
| | | | | | s: Spiroplasma_{—}taiwanense(0.0020) | |
| Ascusb_17652C | 202203086 | Ascusb_17652 | 99.1 | 0.85261 | d: Bacteria(1.0000), p: Firmicutes(0.8000), c: Clostridia(0.6320), | 4301 |
| | | | | | o: Clostridiales(0.4930), f: Lachnospiraceae(0.2514), g: Roseburia(0.0905), | |
| | | | | | s: Roseburia_{—}hominis(0.0226) | |
| Ascusb_1368B | 202203086 | Ascusb_1368 | 99.6 | 0.48461 | d: Bacteria(1.0000), p: “Bacteroidetes”(1.0000), c: “Bacteroidia”(0.9900), | 4302 |
| | | | | | o: “Bacteroidales”(0.9801), f: “Prevotellaceae”(0.9017), g: Prevotella(0.8296), | |
| | | | | | s: Prevotella_{—}ruminicola(0.6553) | |
| Ascusb_12394B | 202203086 | Ascusb_12394 | 99.1 | 0.43932 | d: Bacteria(1.0000), p: “Bacteroidetes”(1.0000), c: “Bacteroidia”(1.0000), | 4303 |
| | | | | | o: “Bacteroidales”(1.0000), f: “Prevotellaceae”(0.8700), g: Prevotella(0.7569), | |
| | | | | | s: Prevotella_{—}ruminicola(0.4920) | |
| Ascusb_1332B | 202203086 | Ascusb_1332 | 98.7 | 0.6881 | d: Bacteria(1.0000), p: “Bacteroidetes”(1.0000), c: “Bacteroidia”(1.0000), | 4304 |
| | | | | | o: “Bacteroidales”(1.0000), f: “Prevotellaceae”(08700), g: Prevotella(0.7569), | |
| | | | | | s: Prevotella_{—}ruminicola(0.4844) | |
| Ascusb_9039B | 202203086 | Ascusb_9039 | 97.8 | 0.5324 | d: Bacteria(1.0000), p: “Bacteroidetes”(1.0000), c: “Bacteroidia”(1.0000), | 4305 |
| | | | | | o: “Bacteroidales”(1.0000), f: “Prevotellaceae”(0.9100), g: Prevotella(0.8281), | |
| | | | | | s: Prevotella_{—}ruminicola(0.6542) | |
| Ascusb_2191D | 202203086 | Ascusb_2191 | 97.3 | 0.61282 | d: Bacteria(1.0000), p: Firmicutes(0.7500), c: Clostridia(0.4875), | 4306 |
| | | | | | o: Clostridiales(0.3120), f: Lachnospiraceae(0.1154), g: Clostridium_XIVa(0.0185), | |
| | | | | | s: Clostridium_{—}glycyrrhizinilyticum(0.0018) | |
| Ascusb_1666A | 202203086 | Ascusb_1666 | 99.6 | 0.61463 | d: Bacteria(1.0000), p: “Bacteroidetes”(0.9800), c: Flavobacteriia(0.5096), | 4307 |
| | | | | | o: “Flavobacteriales”(0.2650), f: Flavobacteriaceae(0.1325), g: Lutibacter(0.0238), | |
| | | | | | s: Lutibacter_{—}flavus(0.0043) | |
| Ascusb_3810B | 202203086 | Ascusb_3810 | 99.6 | 0.65342 | d: Bacteria(1.0000), p: Firmicutes(0.5800), c: Bacilli(0.2726), | 4308 |
| | | | | | o: Lactobacillustobacillaceae(0.0153), g: Lactobacillus(0.0029) | |
| Ascusb_4058C | 202203086 | Ascusb_4058 | 98.7 | 0.62023 | d: Bacteria(1.0000), p: “Bacteroidetes”(1.0000), c: Cytophagia(0.1800), | 4309 |
| | | | | | o: Cytophagales(0.0324), f: Flammeovirgaceae(0.0045), g: Sediminitomix(0.0006), | |
| | | | | | s: Sediminitomix_{—}flava(0.0001 | |
| Ascusb_544B | 202203086 | Ascusb_544 | 99.6 | 0.4311 | d: Bacteria(1.0000), p: “Bacteroidetes”(1.0000), c: “Bacteroidia”(1.0000), | 4310 |
| | | | | | o: “Bacteroidales”(1.0000), f: “Prevotellaceae”(08500), g: Prevotella(0.7225), | |
| | | | | | s: Prevotella_{—}ruminicola(0.5346) | |
| Ascusb_3334A | 202203086 | Ascusb_3334 | 97.3 | 0.5971 | d: Bacteria(1.0000), p: “Bacteroidetes”(1.0000), c: “Bacteroidia”(1.0000), | 4311 |
| | | | | | o: “Bacteroidales”(1.0000), f: “Prevotellaceae”(08600), g: Prevotella(0.7396), | |
| | | | | | s: Prevotella_{—}brevis(0.5843) | |
| Ascusb_9646A | 202203086 | Ascusb_9646 | 97.3 | 0.45176 | d: Bacteria(1.0000), p: “Bacteroidetes”(1.0000), c: “Bacteroidia”(1.0000), | 4312 |
| | | | | | o: “Bacteroidales”(1.0000), f: “Prevotellaceae”(0.7600), g: Prevotella(0.5700), | |
| | | | | | s: Prevotella_{—}ruminicola(0.3762) | |
| Ascusb_15140B | 202203086 | Ascusb_15140 | 99.6 | 0.50718 | d: Bacteria(1.0000), p: “Bacteroidetes”(1.0000), c: “Bacteroidia”(0.5800), | 4313 |
| | | | | | o: “Bacteroidales”(0.3364), f: “Porphyromonadaceae”(0.1043), g: Parabacteroides(0.0167), | |
| | | | | | s: Parabacteroides_{—}gordonii(0.0020) | |
| Ascusb_16891C | 202203086 | Ascusb_16891 | 99.6 | 0.44944 | d: Bacteria(1.0000), p: “Bacteroidetes”(0.9900), c: Flavobacteriia(0.4356), | 4314 |
| | | | | | o: “Flavobacteriales”(0.1917), f: Flavobacteriaceae(0.0805), g: Salinimicrobium(0.0113), | |
| | | | | | s: Salinimicrobium_{—}catena(0.0011) | |
| Ascusb_3089D | 202203086 | Ascusb_3089 | 98.7 | 0.54157 | d: Bacteria(1.0000), p: Firmicutes(0.7700), c: Clostridia(0.5005), | 4315 |
| | | | | | o: Clostridiales(0.3253), f: Christensenellaceae(0.0260), g: Christensenella(0.0021), | |
| | | | | | s: Christensenella_{—}minuta(0.0002) | |
| Ascusb_798A | 202203086 | Ascusb_798 | 97.3 | 0.61787 | d: Bacteria(1.0000), p: Firmicutes(0.7600), c: Clostridia(0.4788), | 4316 |
| | | | | | o: Clostridiales(0.3016), f: Christensenellaceae(0.0241), g: Christensenella(0.0019), | |
| | | | | | s: Christensenella_{—}minuta(0.0002) | |
| Ascusb_994B | 202203086 | Ascusb_994 | 97.3 | 0.57602 | d: Bacteria(1.0000), p: Firmicutes(0.7500), c: Clostridia(0.4575), | 4317 |
| | | | | | o: Clostridiales(0.2791), f: Lachnospiraceae(0.0949), g: Clostridium_XIVa(0.0114), | |
| | | | | | s: Clostridium_{—}glycyrrhizinilyticum(0.0011) | |
| Ascusb_3554B | 202203086 | Ascusb_3554 | 99.6 | 0.49361 | d: Bacteria(1.0000), p: “Tenericutes”(0.9600), c: Mollicutes(0.9216), | 4318 |
| | | | | | o: Anaeroplasmatales(0.8018), f: Anaeroplasmataceae(0.6976), g: Anaeroplasma(0.6069), | |
| | | | | | s: Anaeroplasma_{—}varium(0.2610) | |
| Ascusb_1040B | 202203086 | Ascusb_1040 | 99.6 | 0.60345 | d: Bacteria(1.0000), p: “Bacteroidetes”(0.1500), c: “Bacteroidia”(0.0225), | 4319 |
| | | | | | o: “Bacteroidales”(0.0034), f: Bacteroidaceae(0.0005), g: Anaerorhabdus(0.0001), | |
| | | | | | s: Anaerorhabdus_{—}furcosa(0.0000) | |
| Ascusb_20164A | 202203086 | Ascusb_20164 | 98.7 | 0.56582 | d: Bacteria(1.0000), p: Firmicutes(0.9300), c: Clostridia(0.7905), | 4320 |
| | | | | | o: Clostridiales(0.6719), f: Ruminococcaceae(0.3696), g: Hydrogenoanaerobacterium(0.0776), | |
| | | | | | s: Hydrogenoanaerobacterium_{—}saccharovorans(0.0163) | |
| Ascusb_679A | 202203086 | Ascusb_679 | 100 | 0.62548 | d: Bacteria(1.0000), p: Firmicutes(0.9300), c: Erysipelotrichia(0.7161), | 4321 |
| | | | | | o: Erysipelotrichales(0.5514), f: Erysipelotrichaceae(0.4246), g: Solobacterium(0.2080), | |
| | | | | | s: Solobacterium_{—}moorei(0.1019) | |
| Ascusb_150B | 202203086 | Ascusb_150 | 99.6 | 0.49419 | d: Bacteria(1.0000), p: “Bacteroidetes”(0.9800), c: “Bacteroidia”(0.9506), | 4322 |
| | | | | | o: “Bacteroidales”(0.9221), f: “Prevotellaceae”(0.7377), g: Prevotella(0.5901), | |
| | | | | | s: Prevotella_{—}brevis(0.3423) | |
| Ascusb_2378B | 202203086 | Ascusb_2378 | 97.8 | 0.46305 | d: Bacteria(1.0000), p: “Bacteroidetes”(1.0000), c: “Bacteroidia”(1.0000), | 4323 |
| | | | | | o: “Bacteroidales”(1.0000), f: “Prevotellaceae”(08300), g: Prevotella(0.6806), | |
| | | | | | s: Prevotella_{—}brevis(0.4288) | |
| Ascusb_1882B | 202203086 | Ascusb_1882 | 99.6 | 0.65868 | d: Bacteria(1.0000), p: Firmicutes(0.6600), c: Bacilli(0.3696), | 4324 |
| | | | | | o: Lactobacillo.1368), f: Lactobacillus(0.0383), g: Pediococcus(0.0034), | |
| | | | | | s: Pediococcus_{—}pentosaceus(0.0003) | |
| Ascusb_1675A | 202203086 | Ascusb_1675 | 98.2 | 0.56705 | d: Bacteria(1.0000), p: “Bacteroidetes”(0.8100), c: “Bacteroidia”(0.3807), | 4325 |
| | | | | | o: “Bacteroidales”(0.1789), f: “Porphyromonadaceae”(0.0358), g: Parabacteroides(0.0043), | |
| | | | | | s: Parabacteroides_{—}merdae(0.0005) | |
| Ascusb_18852A | 202203086 | Ascusb_18852 | 98.2 | 0.52067 | d: Bacteria(1.0000), p: “Bacteroidetes”(0.8600), c: “Bacteroidia”(0.4730), | 4326 |
| | | | | | o: “Bacteroidales”(0.2602), f: “Porphyromonadaceae”(0.0598), g: Parabacteroides(0.0090), | |
| | | | | | s: Parabacteroides_{—}merdae(0.0013) | |
| Ascusb_5045A | 202203086 | Ascusb_5045 | 97.8 | 0.51307 | d: Bacteria(1.0000), p: “Bacteroidetes”(0.7000), c: “Bacteroidia”(0.3150), | 4327 |
| | | | | | o: “Bacteroidales”(0.1418), f: “Porphyromonadaceae”(0.0369), g: Coprobacter(0.0018), | |
| | | | | | s: Coprobacter_{—}fastidiosus(0.0001) | |
| Ascusb_3680B | 202203086 | Ascusb_3680 | 97.3 | 0.515 | d: Bacteria(1.0000), p: “Bacteroidetes”(0.7700), c: “Bacteroidia”(0.3234), | 4328 |
| | | | | | o: “Bacteroidales”(0.1358), f: Prolixibacteraceae(0.0177), g: Meniscus(0.0014), | |
| | | | | | s: Meniscus_{—}glaucopis(0.0001) | |
| Ascusb_2536A | 202203086 | Ascusb_2536 | 97.3 | 0.52008 | d: Bacteria(1.0000), p: “Proteobacteria”(0.2800), c: Gammaproteobacteria(0.0756), | 4329 |
| | | | | | o: “Vibrionales”(0.0076), f: Vibrionaceae(0.0008), g: Vibrio(0.0001), | |
| | | | | | s: Vibrio_{—}diazotrophicus(0.0000) | |
| Ascusb_1715C | 202203086 | Ascusb_1715 | 100 | 0.53111 | d: Bacteria(1.0000), p: “Bacteroidetes”(1.0000), c: “Bacteroidia”(1.0000), | 4330 |
| | | | | | o: “Bacteroidales”(1.0000), f: “Prevotellaceae”(0.9600), g: Prevotella(0.9216), | |
| | | | | | s: Prevotella_{—}brevis(0.8663) | |
| Ascusb_1340B | 202203086 | Ascusb_1340 | 99.6 | 0.54716 | d: Bacteria(1.0000), p: “Tenericutes”(0.5200), c: Mollicutes(0.2704), | 4331 |
| | | | | | o: Mycoplasmatales(0.1082), f: Mycoplasmataceae(0.0433), g: Mycoplasma(0.0173), | |
| | | | | | s: Mycoplasma_{—}penetrans(0.0033) | |
| Ascusb_818A | 202203086 | Ascusb_818 | 99.6 | 0.47568 | d: Bacteria(1.0000), p: Firmicutes(0.9400), c: Clostridia(0.8648), | 4332 |
| | | | | | o: Clostridiales(0.7956), f: Ruminococcaceae(0.6444), g: Hydrogenoanaerobacterium(0.3544), | |
| | | | | | s: Hydrogenoanaerobacterium_{—}saccharovorans(0.1949) | |
| Ascusb_1278B | 202203086 | Ascusb_1278 | 100 | 0.58225 | d: Bacteria(1.0000), p: Firmicutes(0.9800), c: Erysipelotrichia(0.9310), | 4333 |
| | | | | | o: Erysipelotrichales(0.8844), f: Erysipelotrichaceae(0.8402), g: Faecalicoccus(0.7814) | |
| Ascusb_18804B | 202203086 | Ascusb_18804 | 99.1 | 0.49229 | d: Bacteria(1.0000), p: “Bacteroidetes”(0.9800), c: “Bacteroidia”(0.9604), | 4334 |
| | | | | | o: “Bacteroidales”(0.9412), f: “Prevotellaceae”(0.5930), g: Prevotella(0.3676), | |
| | | | | | s: Prevotella_{—}corporis(0.0882) | |
| Ascusb_1532C | 202203086 | Ascusb_1532 | 98.7 | 0.5383 | d: Bacteria(1.0000), p: “Bacteroidetes”(0.9700), c: Cytophagia(0.2328), | 4335 |
| | | | | | o: Cytophagales(0.0559), f: Flammeovirgaceae(0.0123), g: Aureibacter(0.0018), | |
| | | | | | s: Aureibacter_{—}tunicatorum(0.0003) | |
| Ascusb_1760B | 202203086 | Ascusb_1760 | 99.6 | 0.72911 | d: Bacteria(1.0000), p: Firmicutes(0.8600), c: Clostridia(0.6450), | 4336 |
| | | | | | o: Clostridiales(0.4838), f: Ruminococcaceae(0.3386), g: Hydrogenoanaerobacterium(0.1930), | |
| | | | | | s: Hydrogenoanaerobacterium_{—}saccharovorans(0.1100) | |
| Ascusb_626A | 202203086 | Ascusb_626 | 100 | 0.57936 | d: Bacteria(1.0000), p: Firmicutes(0.9200), c: Clostridia(0.8372), | 4337 |
| | | | | | o: Clostridiales(0.7451), f: Lachnospiraceae(0.4992), g: Lachnospiracea_{—}incertae_{—}sedis(0.0749), | |
| | | | | | s: Eubacterium_{—}eligens(0.0090) | |
| Ascusb_21571B | 202203086 | Ascusb_21571 | 99.1 | 0.54211 | d: Bacteria(1.0000), p: “Bacteroidetes”(1.0000), c: “Bacteroidia”(1.0000), | 4338 |
| | | | | | o: “Bacteroidales”(1.0000), f: “Prevotellaceae”(09800), g: Prevotella(0.9604), | |
| | | | | | s: Prevotella_{—}brevis(0.8740) | |
| Ascusb_822A | 202203086 | Ascusb_822 | 99.6 | 0.63136 | d: Bacteria(1.0000), p: Firmicutes(0.9600), c: Clostridia(0.9216), | 4339 |
| | | | | | o: Clostridiales(0.8847), f: Lachnospiraceae(0.8228), g: Syntrophococcus(0.2057), | |
| | | | | | s: Syntrophococcus_{—}sucromutans(0.0514) | |
| Ascusb_1829B | 202203086 | Ascusb_1829 | 98.7 | 0.5573 | d: Bacteria(1.0000), p: “Bacteroidetes”(1.0000), c: “Bacteroidia”(1.0000), | 4340 |
| | | | | | o: “Bacteroidales”(1.0000), f: “Prevotellaceae”(0.9900), g: Prevotella(0.9801), | |
| | | | | | s: Prevotella_{—}brevis(0.8919) | |
| Ascusb_2744B | 202203086 | Ascusb_2744 | 98.7 | 0.50699 | d: Bacteria(1.0000), p: “Bacteroidetes”(1.0000), c: “Bacteroidia”(1.0000), | 4341 |
| | | | | | o: “Bacteroidales”(1.0000), f: “Prevotellaceae”(0.9800), g: Prevotella(0.9604), | |
| | | | | | s: Prevotella_{—}brevis(0.8548) | |
| Ascusb_1889C | 202203086 | Ascusb_1889 | 97.8 | 0.50423 | d: Bacteria(1.0000), p: “Bacteroidetes”(1.0000), c: “Bacteroidia”(1.0000), | 4342 |
| | | | | | o: “Bacteroidales”(1.0000), f: “Prevotellaceae”(09900), g: Prevotella(0.9801), | |
| | | | | | s: Prevotella_{—}brevis(0.9605) | |
| Ascusb_300C | 202203086 | Ascusb_300 | 99.1 | 0.71072 | d: Bacteria(1.0000), p: “Fibrobacteres”(1.0000), c: “Fibrobacteria”(1.0000), | 4343 |
| | | | | | o: “Fibrobacterales”(1.0000), f: “Fibrobacteraceae”(1.0000), g: Fibrobacter(1.0000), | |
| | | | | | s: Fibrobacter_{—}succinogenes_subsp._succinogenes(0.9700) | |
| Ascusb_1101B | 202203086 | Ascusb_1101 | 98.2 | 0.48709 | d: Bacteria(1.0000), p: “Fibrobacteres”(1.0000), c: “Fibrobacteria”(1.0000), | 4344 |
| | | | | | o: “Fibrobacterales”(1.0000), f: “Fibrobacteraceae”(1.0000), g: Fibrobacter(1.0000), | |
| | | | | | s: Fibrobacter_{—}succinogenes_subsp._succinogenes(0.9800) | |
| Ascusb_813C | 202203086 | Ascusb_813 | 97.8 | 0.71124 | d: Bacteria(1.0000), p: “Fibrobacteres”(1.0000), c: “Fibrobacteria”(1.0000), | 4345 |
| | | | | | o: “Fibrobacterales”(1.0000), f: “Fibrobacteraceae”(1.0000), g: Fibrobacter(1.0000), | |
| | | | | | s: Fibrobacter_{—}succinogenes_{—}subsp._{—}succinogenes(0.9700) | |
| Ascusb_9659A | 202203086 | Ascusb_9659 | 97.3 | 0.46694 | d: Bacteria(1.0000), p: “Fibrobacteres”(1.0000), c: “Fibrobacteria”(1.0000), | 4346 |
| | | | | | o: “Fibrobacterales”(1.0000), f: “Fibrobacteraceae”(1.0000), g: Fibrobacter(1.0000), | |
| | | | | | s: Fibrobacter_{—}succinogenes_subsp._succinogenes(1.0000) | |
| Ascusb_2648B | 202203086 | Ascusb_2648 | 98.2 | 0.59551 | d: Bacteria(1.0000), p: “Bacteroidetes”(0.9600), c: “Bacteroidia”(0.8256), | 4347 |
| | | | | | o: “Bacteroidales”(0.7100), f: Bacteroidaceae(0.1846), g: Bacteroides(0.0480), | |
| | | | | | s: Bacteroides_{—}plebeius(0.0086) | |
| Ascusb_4062B | 202203086 | Ascusb_4062 | 99.1 | 0.55964 | d: Bacteria(1.0000), p: “Bacteroidetes”(0.9800), c: “Bacteroidia”(0.9310), | 4348 |
| | | | | | o: “Bacteroidales”(0.8844), f: Bacteroidaceae(0.1946), g: Bacteroides(0.0428), | |
| | | | | | s: Bacteroides_{—}plebeius(0.0056) | |
| Ascusb_1276B | 202203086 | Ascusb_1276 | 99.6 | 0.53247 | d: Bacteria(1.0000), p: “Bacteroidetes”(0.9000), c: “Bacteroidia”(0.7380), | 4349 |
| | | | | | o: “Bacteroidales”(0.6052), f: “Prevotellaceae”(0.3691), g: Prevotella(0.2252), | |
| | | | | | s: Prevotella_{—}oulorum(0.0293) | |
| Ascusb_726A | 202203086 | Ascusb_726 | 99.1 | 0.79855 | d: Bacteria(1.0000), p: Firmicutes(0.8300), c: Clostridia(0.6723), | 4350 |
| | | | | | o: Clostridiales(0.5446), f: Lachnospiraceae(0.1525), g: Lachnoanaerobaculum(0.0137), | |
| | | | | | s: Lachnoanaerobaculum_{—}orale(0.0012) | |
| Ascusb_927B | 202203086 | Ascusb_927 | 99.6 | 0.51524 | d: Bacteria(1.0000), p: “Bacteroidetes”(1.0000), c: “Bacteroidia”(1.0000), | 4351 |
| | | | | | o: “Bacteroidales”(1.0000), f: “Prevotellaceae”(0.6400), g: Prevotella(0.3904), | |
| | | | | | s: Prevotella_{—}brevis(0.1757) | |
| Ascusb_355B | 202203086 | Ascusb_355 | 99.1 | 0.47535 | d: Bacteria(1.0000), p: Firmicutes(0.9600), c: Clostridia(0.8832), | 4352 |
| | | | | | o: Clostridiales(0.8037), f: Clostridiales_IncertaeSedis_XIII(0.4662), g: Anaerovorax(0.2517), | |
| | | | | | s: Anaerovorax_{—}odorimutans(0.1359) | |
| Ascusb_7910B | 202203086 | Ascusb_7910 | 100 | 0.49388 | d: Bacteria(1.0000), p: “Bacteroidetes”(1.0000), c: Flavobacteriia(0.5700), | 4353 |
| | | | | | o: “Flavobacteriales”(0.3249), f: Flavobacteriaceae(0.1722), g: Maribacter(0.0499), | |
| | | | | | s: Maribacter_{—}thermophilus(0.0135) | |
| Ascusb_1230A | 202203086 | Ascusb_1230 | 99.6 | 0.52428 | d: Bacteria(1.0000), p: Firmicutes(0.9700), c: Clostridia(0.9409), | 4354 |
| | | | | | o: Clostridiales(0.9127), f: Lachnospiraceae(0.8032), g: Clostridium_XIVa(0.4176), | |
| | | | | | s: Clostridium_{—}bolteae(0.1420) | |
| Ascusb_794A | 202203086 | Ascusb_794 | 100 | 0.50433 | d: Bacteria(1.0000), p: “Bacteroidetes”(1.0000), c: “Bacteroidia”(1.0000), | 4355 |
| | | | | | o: “Bacteroidales”(1.0000), f: “Prevotellaceae”(0.9600), g: Prevotella(0.9216), | |
| | | | | | s: Prevotella_{—}brevis(0.8755) | |
| Ascusb_4971C | 202203086 | Ascusb_4971 | 97.3 | 0.54149 | d: Bacteria(1.0000), p: Firmicutes(1.0000), c: Clostridia(1.0000), | 4356 |
| | | | | | o: Clostridiales(1.0000), f: Lachnospiraceae(0.8300), g: Clostridium_XIVa(0.4897), | |
| | | | | | s: Clostridium_{—}glycyrrhizinilyticum(0.2400) | |
| Ascusb_218A | 202203086 | Ascusb_218 | 99.6 | 0.64796 | d: Bacteria(1.0000), p: “Chloroflexi”(0.3700), c: Anaerolineae(0.1369), | 4357 |
| | | | | | o: Anaerolineales(0.0507), f: Anaerolineaceae(0.0187), g: Ornatilinea(0.0051), | |
| | | | | | s: Ornatilinea_{—}apprima(0.0014) | |
| Ascusb_1630°_C. | 202203086 | Ascusb_1630 | 99.6 | 0.51231 | d: Bacteria(1.0000), p: “Bacteroidetes”(1.0000), c: “Bacteroidia”(1.0000), | 4358 |
| | | | | | o: “Bacteroidales”(1.0000), f: “Prevotellaceae”(0.7800), g: Prevotella(0.6084), | |
| | | | | | s: Prevotella_{—}brevis(0.3955) | |
| Ascusb_4081C | 202203086 | Ascusb_4081 | 97.3 | 0.71508 | d: Bacteria(1.0000), p: Firmicutes(0.2900), c: Bacilli(0.0696), | 4359 |
| | | | | | o: Bacillales(0.0146), f: Staphylococcaceae(0.0025), g: Staphylococcus(0.0004), | |
| | | | | | s: Staphylococcus_{—}rostri(0.0000) | |
| Ascusb_5201C | 202203086 | Ascusb_5201 | 99.6 | 0.50458 | d: Bacteria(1.0000), p: “Bacteroidetes”(0.7300), c: “Bacteroidia”(0.3358), | 4360 |
| | | | | | o: “Bacteroidales”(0.1545), f: “Porphyromonadaceae”(0.0386), g: Butyricimonas(0.0042), | |
| | | | | | s: Butyricimonas_{—}faecihominis(0.0004) | |
| Ascusb_865A | 202203086 | Ascusb_865 | 100 | 0.46604 | d: Bacteria(1.0000), p: Firmicutes(0.6700), c: Clostridia(0.3015), | 4361 |
| | | | | | o: Clostridiales(0.1236), f: Ruminococcaceae(0.0297), g: Ruminococcus(0.0053), | |
| | | | | | s: Ruminococcus_{—}flavefaciens(0.0005) | |
| Ascusb_251B | 202203086 | Ascusb_251 | 99.6 | 0.71767 | d: Bacteria(1.0000), p: Firmicutes(0.8800), c: Bacilli(0.7480), | 4362 |
| | | | | | o: Lactobacillustobacillaceae(0.0503), g: Lactobacillus(0.0121), | |
| | | | | | s: Lactobacillus_{—}delbrueckii_subsp._sunkii(0.0011) | |
| Ascusb_6130B | 202203086 | Ascusb_6130 | 100 | 0.44883 | d: Bacteria(1.0000), p: “Bacteroidetes”(0.9900), c: “Bacteroidia”(0.9504), | 4363 |
| | | | | | o: “Bacteroidales”(0.9124), f: “Prevotellaceae”(0.6934), g: Prevotella(0.5201), | |
| | | | | | s: Prevotella_{—}bryantii(0.0832) | |
| Ascusb_51C | 202203086 | Ascusb_51 | 98.2 | 0.90565 | d: Bacteria(1.0000), p: “Bacteroidetes”(1.0000), c: “Bacteroidia”(0.9900), | 4364 |
| | | | | | o: “Bacteroidales”(0.9801), f: “Prevotellaceae”(0.9017), g: Prevotella(0.8115), | |
| | | | | | s: Prevotella_{—}bryantii(0.3246) | |
| Ascusb_17128C | 202203086 | Ascusb_17128 | 99.6 | 0.53035 | d: Bacteria(1.0000), p: “Bacteroidetes”(1.0000), c: “Bacteroidia”(0.9900), | 4365 |
| | | | | | o: “Bacteroidales”(0.9801), f: “Prevotellaceae”(0.9605), g: Prevotella(0.9413), | |
| | | | | | s: Prevotella_{—}brevis(0.8283) | |
| Ascusb_57C | 202203086 | Ascusb_57 | 99.6 | 0.51727 | d: Bacteria(1.0000), p: “Bacteroidetes”(1.0000), c: “Bacteroidia”(1.0000), | 4366 |
| | | | | | o: “Bacteroidales”(1.0000), f: “Prevotellaceae”(09800), g: Prevotella(0.9604), | |
| | | | | | s: Prevotella_{—}brevis(0.8548) | |
| Ascusb_3349C | 202203086 | Ascusb_3349 | 98.7 | 0.49172 | d: Bacteria(1.0000), p: Firmicutes(0.9100), c: Bacilli(0.7098), | 4367 |
| | | | | | o: Bacillales(0.3691), f: Paenibacillaceae_1(0.1218), g: Paenibacillus(0.0317), | |
| | | | | | s: Paenibacillus_{—}mendelii(0.0022) | |
| Ascusb_725°_C. | 202203086 | Ascusb_725 | 100 | 0.50013 | d: Bacteria(1.0000), p: “Bacteroidetes”(1.0000), c: “Bacteroidia”(1.0000), | 4368 |
| | | | | | o: “Bacteroidales”(1.0000), f: “Prevotellaceae”(0.9400), g: Prevotella(0.8836), | |
| | | | | | s: Prevotella_{—}brevis(0.7952) | |
| Ascusb_7360C | 202203086 | Ascusb_7360 | 99.6 | 0.46247 | d: Bacteria(1.0000), p: Firmicutes(0.7300), c: Clostridia(0.4964), | 4369 |
| | | | | | o: Clostridiales(0.3376), f: Lachnospiraceae(0.1384), g: Lachnospiracea_{—}incertae_{—}sedis(0.0388), | |
| | | | | | s: Eubacterium_{—}xylanophilum(0.0085) | |
| Ascusb_15382B | 202203086 | Ascusb_15382 | 97.8 | 0.50888 | d: Bacteria(1.0000), p: Cyanobacteria/Chloroplast(0.2600), | 4370 |
| | | | | | c: Cyanobacteria(0.0676), f: Family_XI(0.0108), g: GpXI(0.0017) | |
| Ascusb_386C | 202203086 | Ascusb_386 | 99.1 | 0.60942 | d: Bacteria(1.0000), p: “Bacteroidetes”(0.9900), c: “Bacteroidia”(0.3564), | 4371 |
| | | | | | o: “Bacteroidales”(0.1283), f: “Rikenellaceae”(0.0205), g: Alistipes(0.0033), | |
| | | | | | s: Alistipes_{—}finegoldii(0.0003) | |
| Ascusb_1419C | 202203086 | Ascusb_1419 | 99.1 | 0.57852 | d: Bacteria(1.0000), p: “Bacteroidetes”(0.9900), c: “Bacteroidia”(0.3366), | 4372 |
| | | | | | o: “Bacteroidales”(0.1144), f: “Rikenellaceae”(0.0160), g: Alistipes(0.0021), | |
| | | | | | s: Alistipes_{—}finegoldii(0.0002) | |
| Ascusb_1867B | 202203086 | Ascusb_1867 | 99.6 | 0.56076 | d: Bacteria(1.0000), p: Firmicutes(0.4000), c: Clostridia(0.1360), | 4373 |
| | | | | | o: Clostridiales(0.0449), f: Ruminococcaceae(0.0103), g: Hydrogenoanaerobacterium(0.0009), | |
| | | | | | s: Hydrogenoanaerobacterium_{—}saccharovorans(0.0001) | |
| Ascusb_3294B | 202203086 | Ascusb_3294 | 97.8 | 0.52327 | d: Bacteria(1.0000), p: Firmicutes(0.3700), c: Clostridia(0.1221), | 4374 |
| | | | | | o: Clostridiales(0.0403), f: Ruminococcaceae(0.0101), g: Hydrogenoanaerobacterium(0.0009), | |
| | | | | | s: Hydrogenoanaerobacterium_{—}saccharovorans(0.0001) | |
| Ascusb_2831B | 202203086 | Ascusb_2831 | 98.7 | 0.54039 | d: Bacteria(1.0000), p: Firmicutes(0.8400), c: Clostridia(0.6804), | 4375 |
| | | | | | o: Clostridiales(0.5511), f: Christensenellaceae(0.2370), g: Christensenella(0.1019), | |
| | | | | | s: Christensenella_{—}minuta(0.0438) | |
| Ascusb_1716A | 202203086 | Ascusb_1716 | 99.6 | 0.57849 | d: Bacteria(1.0000), p: Cyanobacteria/Chloroplast(0.1700), c: Cyanobacteria(0.0289), | 4376 |
| | | | | | f: Family_XI(0.0029), g: GpXI(0.0003) | |
| Ascusb_120C | 202203086 | Ascusb_120 | 99.6 | 0.50223 | d: Bacteria(1.0000), p: “Bacteroidetes”(1.0000), c: “Bacteroidia”(1.0000), | 4377 |
| | | | | | o: “Bacteroidales”(1.0000), f: “Prevotellaceae”(0.9500), g: Prevotella(0.9025), | |
| | | | | | s: Prevotella_{—}brevis(0.6408) | |
| Ascusb_1149B | 202203086 | Ascusb_1149 | 99.1 | 0.58282 | d: Bacteria(1.0000), p: “Proteobacteria”(0.6200), c: Alphaproteobacteria(0.1426), | 4378 |
| | | | | | o: Sphingomonadales(0.0114), f: Sphingomonadaceae(0.0009), g: Sphingomicrobium(0.0000), | |
| | | | | | s: Sphingomicrobium_{—}flavum(0.0000) | |
| Ascusb_2710B | 202203086 | Ascusb_2710 | 100 | 0.65899 | d: Bacteria(1.0000), p: “Bacteroidetes”(0.9500), c: “Bacteroidia”(0.7220), | 4379 |
| | | | | | o: “Bacteroidales”(0.5487), f: Marinilabiliaceae(0.1482), g: Alkalitalea(0.0163), | |
| | | | | | s: Alkalitalea_{—}saponilacus(0.0018) | |
| Ascusb_5711B | 202203086 | Ascusb_5711 | 97.8 | 0.55693 | d: Bacteria(1.0000), p: “Bacteroidetes”(0.9700), c: “Bacteroidia”(0.7760), | 4380 |
| | | | | | o: “Bacteroidales”(0.6208), f: Marinilabiliaceae(0.2669), g: Alkalitalea(0.0828), | |
| | | | | | s: Alkalitalea_{—}saponilacus(0.0257) | |
| Ascusb_548A | 202203086 | Ascusb_548 | 100 | 0.4695 | d: Bacteria(1.0000), p: “Fibrobacteres”(0.9100), c: “Fibrobacteria”(0.8281), | 4381 |
| | | | | | o: “Fibrobacterales”(0.7536), f: “Fibrobacteraceae”(0.6857), g: Fibrobacter(0.6240), | |
| | | | | | s: Fibrobacter_{—}succinogenes_{—}subsp._{—}succinogenes(0.4056) | |
| Ascusb_2917B | 202203086 | Ascusb_2917 | 99.6 | 0.48058 | d: Bacteria(1.0000), p: Firmicutes(0.8000), c: Erysipelotrichia(0.4480), | 4382 |
| | | | | | o: Erysipelotrichales(0.2509), f: Erysipelotrichaceae(0.1405), g: Erysipelothrix(0.0604), | |
| | | | | | s: Erysipelothrix_{—}tonsillarum(0.0139) | |
| Ascusb_555B | 202203086 | Ascusb_555 | 98.2 | 0.60354 | d: Bacteria(1.0000), p: Firmicutes(0.6700), c: Erysipelotrichia(0.3015), | 4383 |
| | | | | | o: Erysipelotrichales(0.1357), f: Erysipelotrichaceae(0.0611), g: Erysipelothrix(0.0177), | |
| | | | | | s: Erysipelothrix_{—}rhusiopathiae(0.0027) | |
| Ascusb_2255C | 202203086 | Ascusb_2255 | 98.2 | 0.65925 | d: Bacteria(1.0000), p: “Bacteroidetes”(1.0000), c: “Bacteroidia”(1.0000), | 4384 |
| | | | | | o: “Bacteroidales”(1.0000), f: Bacteroidaceae(0.6700), g: Bacteroides(0.4489), | |
| | | | | | s: Bacteroides_{—}plebeius(0.2155) | |
| Ascusb_4938B | 202203086 | Ascusb_4938 | 98.7 | 0.54788 | d: Bacteria(1.0000), p: “Bacteroidetes”(1.0000), c: “Bacteroidia”(0.9600), | 4385 |
| | | | | | o: “Bacteroidales”(0.9216), f: Bacteroidaceae(0.8755), g: Bacteroides(0.8317), | |
| | | | | | s: Bacteroides_{—}plebeius(0.2745) | |
| Ascusb_5705A | 202203086 | Ascusb_5705 | 97.8 | 0.50683 | d: Bacteria(1.0000), p: “Bacteroidetes”(1.0000), c: “Bacteroidia”(0.9900), | 4386 |
| | | | | | o: “Bacteroidales”(0.9801), f: Bacteroidaceae(0.9409), g: Bacteroides(0.9033), | |
| | | | | | s: Bacteroides_{—}plebeius(0.3342) | |
| Ascusb_186A | 202203086 | Ascusb_186 | 100 | 0.62116 | d: Bacteria(1.0000), p: Firmicutes(0.8200), c: Clostridia(0.6396), | 4387 |
| | | | | | o: Clostridiales(0.4989), f: Lachnospiraceae(0.1996), g: Lachnoanaerobaculum(0.0539), | |
| | | | | | s: Lachnoanaerobaculum_{—}orale(0.0124) | |
| Ascusb_371A | 202203086 | Ascusb_371 | 97.8 | 0.51823 | d: Bacteria(1.0000), p: Firmicutes(0.8400), c: Clostridia(0.6720), | 4388 |
| | | | | | o: Clostridiales(0.5376), f: Lachnospiraceae(0.2258), g: Lachnoanaerobaculum(0.0723), | |
| | | | | | s: Lachnoanaerobaculum_{—}orale(0.0202) | |
| Ascusb_2432C | 202203086 | Ascusb_2432 | 98.7 | 0.47083 | d: Bacteria(1.0000), p: “Proteobacteria”(0.8600), c: Alphaproteobacteria(0.5934), | 4389 |
| | | | | | o: Rhizobiales(0.3264), f: Beijerinckiaceae(0.1240), g: Methylocella(0.0236), | |
| | | | | | s: Methylocella_{—}tundrae(0.0045) | |
| Ascusb_338B | 202203086 | Ascusb_338 | 98.2 | 0.55013 | d: Bacteria(1.0000), p: Firmicutes(0.9600), c: Clostridia(0.9216), | 4390 |
| | | | | | o: Clostridiales(0.8847), f: Lachnospiraceae(0.8051), g: Lachnospiracea_{—}incertae_{—}sedis(0.4992), | |
| | | | | | s: Eubacterium_{—}ruminantium(0.2945) | |
| Ascusb_3092C | 202203086 | Ascusb_3092 | 99.1 | 0.52321 | d: Bacteria(1.0000), p: “Bacteroidetes”(0.9400), c: “Bacteroidia”(0.7802), | 4391 |
| | | | | | o: “Bacteroidales”(0.6476), f: “Prevotellaceae”(0.3756), g: Prevotella(0.2178), | |
| | | | | | s: Prevotellabryantii(0.0349) | |
| Ascusb_15051B | 202203086 | Ascusb_15051 | 98.2 | 0.52567 | d: Bacteria(1.0000), p: “Bacteroidetes”(0.9600), c: “Bacteroidia”(0.8256), | 4392 |
| | | | | | o: “Bacteroidales”(0.7100), f: “Prevotellaceae”(0.4757), g: Prevotella(0.3187), | |
| | | | | | s: Prevotellaoryzae(0.0669) | |
| Ascusb_1985D | 202203086 | Ascusb_1985 | 97.8 | 0.57661 | d: Bacteria(1.0000), p: “Bacteroidetes”(0.9900), c: “Bacteroidia”(0.8910), | 4393 |
| | | | | | o: “Bacteroidales”(0.8019), f: “Prevotellaceae”(0.5212), g: Prevotella(0.3388), | |
| | | | | | s: Prevotella_{—}bryantii(0.0881) | |
| Ascusb_4173B | 202203086 | Ascusb_4173 | 97.8 | 0.57751 | d: Bacteria(1.0000), p: “Bacteroidetes”(0.9600), c: “Bacteroidia”(0.8352), | 4394 |
| | | | | | o: “Bacteroidales”(0.7266), f: “Prevotellaceae”(04505), g: Prevotella(0.2793), | |
| | | | | | s: Prevotella_{—}bryantii(0.0503) | |
| Ascusb_14185C | 202203086 | Ascusb_14185 | 97.3 | 0.54439 | d: Bacteria(1.0000), p: “Bacteroidetes”(0.9800), c: “Bacteroidia”(0.9114), | 4395 |
| | | | | | o: “Bacteroidales”(0.8476), f: “Prevotellaceae”(0.5679), g: Prevotella(0.3805), | |
| | | | | | s: Prevotella_{—}oryzae(0.0723) | |
| Ascusb_4975C | 202203086 | Ascusb_4975 | 99.1 | 0.62611 | d: Bacteria(1.0000), p: “Proteobacteria”(0.9000), c: Alphaproteobacteria(0.7470), | 4396 |
| | | | | | o: Rhizobiales(0.5229), f: Hyphomicrobiaceae(0.1516), g: Devosia(0.0227), | |
| | | | | | s: Devosia_{—}neptuniae(0.0032) | |
| Ascusb_1195B | 202203086 | Ascusb_1195 | 100 | 0.56799 | d: Bacteria(1.0000), p: Firmicutes(0.9000), c: Clostridia(0.7830), | 4397 |
| | | | | | o: Clostridiales(0.6812), f: Clostridiales_Incertae_Sedis_XII(0.2384), g: Fusibacter(0.0811), | |
| | | | | | s: Fusibacter_{—}paucivorans(0.0259) | |
| Ascusb_6078A | 202203086 | Ascusb_6078 | 98.7 | 0.49981 | d: Bacteria(1.0000), p: “Bacteroidetes”(1.0000), c: “Bacteroidia”(0.8400), | 4398 |
| | | | | | o: “Bacteroidales”(0.7056), f: Bacteroidaceae(0.3951), g: Bacteroides(0.2213), | |
| | | | | | s: Bacteroides_{—}rodentium(0.0332) | |
| Ascusb_3175B | 202203086 | Ascusb_3175 | 99.1 | 0.68723 | d: Bacteria(1.0000), p: “Bacteroidetes”(1.0000), c: “Bacteroidia”(0.9400), | 4399 |
| | | | | | o: “Bacteroidales”(0.8836), f: Bacteroidaceae(0.2828), g: Bacteroides(0.0905), | |
| | | | | | s: Bacteroides_{—}massiliensis(0.0136) | |
| Ascusb_992B | 202203086 | Ascusb_992 | 99.1 | 0.67593 | d: Bacteria(1.0000), p: “Bacteroidetes”(0.9900), c: “Bacteroidia”(0.9207), | 4400 |
| | | | | | o: “Bacteroidales”(0.8563), f: “Prevotellaceae”(04709), g: Prevotella(0.2543), | |
| | | | | | s: Prevotella_{—}bryantii(0.0280) | |
| Ascusb_12024B | 202203086 | Ascusb_12024 | 98.7 | 0.63984 | d: Bacteria(1.0000), p: “Bacteroidetes”(0.9800), c: “Bacteroidia”(0.9114), | 4401 |
| | | | | | o: “Bacteroidales”(0.8476), f: Bacteroidaceae(0.2373), g: Bacteroides(0.0665), | |
| | | | | | s: Bacteroides_{—}massiliensis(0.0073) | |
| Ascusb_5433B | 202203086 | Ascusb_5433 | 97.3 | 0.51896 | d: Bacteria(1.0000), p: “Bacteroidetes”(0.9800), c: “Bacteroidia”(0.9212), | 4402 |
| | | | | | o: “Bacteroidales”(0.8659), f: Bacteroidaceae(0.3983), g: Bacteroides(0.1832), | |
| | | | | | s: Bacteroides_{—}massiliensis(0.0293) | |
| Ascusb_238A | 202203086 | Ascusb_238 | 99.6 | 0.76705 | d: Bacteria(1.0000), p: Firmicutes(0.7600), c: Clostridia(0.5472), | 4403 |
| | | | | | o: Clostridiales(0.3940), f: Ruminococcaceae(0.1852), g: Hydrogenoanaerobacterium(0.0630), | |
| | | | | | s: Hydrogenoanaerobacterium_{—}saccharovorans(0.0214) | |
| Ascusb_1657A | 202203086 | Ascusb_1657 | 100 | 0.75435 | d: Bacteria(1.0000), p: Firmicutes(0.8000), c: Clostridia(0.6000), | 4404 |
| | | | | | o: Clostridiales(0.4500), f: Ruminococcaceae(0.1305), g: Clostridium_IV(0.0339), | |
| | | | | | s: Clostridiumleptum(0.0085) | |
| Ascusb_3123B | 202203086 | Ascusb_3123 | 99.6 | 0.65688 | d: Bacteria(1.0000), p: “Tenericutes”(0.2800), c: Mollicutes(0.0784), | 4405 |
| | | | | | o: Entomoplasmatales(0.0180), f: Spiroplasmataceae(0.0041), g: Spiroplasma(0.0010), | |
| | | | | | s: Spiroplasma_{—}clarkii(0.0000) | |
| Ascusb_2743A | 202203086 | Ascusb_2743 | 97.3 | 0.56643 | d: Bacteria(1.0000), p: “Bacteroidetes”(0.7500), c: “Bacteroidia”(0.3075), | 4406 |
| | | | | | o: “Bacteroidales”(0.1261), f: “Porphyromonadaceae”(0.0277), g: Parabacteroides(0.0031), | |
| | | | | | s: Parabacteroidesmerdae(0.0003) | |
| Ascusb_6203A | 202203086 | Ascusb_6203 | 99.6 | 0.59226 | d: Bacteria(1.0000), p: Firmicutes(0.3000), c: Erysipelotrichia(0.0420), | 4407 |
| | | | | | o: Erysipelotrichales(0.0059), f: Erysipelotrichaceae(0.0008), g: Erysipelotrichaceae_{—}incertae_{—}sedis(0.0001), | |
| | | | | | s: Eubacteriumdolichum(0.0000) | |
| Ascusb_12676A | 202203086 | Ascusb_12676 | 98.7 | 0.52575 | d: Bacteria(1.0000), p: Firmicutes(0.8700), c: Clostridia(0.6438), | 4408 |
| | | | | | o: Clostridiales(0.4635), f: Ruminococcaceae(0.2040), g: Butyricicoccus(0.0367), | |
| | | | | | s: Butyricicoccus_{—}pullicaecorum(0.0066) | |
| Ascusb_7893A | 202203086 | Ascusb_7893 | 97.8 | 0.53667 | d: Bacteria(1.0000), p: Firmicutes(0.8800), c: Clostridia(0.6864), | 4409 |
| | | | | | o: Clostridiales(0.5285), f: Ruminococcaceae(0.2273), g: Butyricicoccus(0.0318), | |
| | | | | | s: Butyricicoccus_{—}pullicaecorum(0.0045) | |
| Ascusb_1155A | 202203086 | Ascusb_1155 | 97.3 | 0.64018 | d: Bacteria(1.0000), p: Firmicutes(0.8900), c: Clostridia(0.7031), | 4410 |
| | | | | | o: Clostridiales(0.5414), f: Ruminococcaceae(0.2274), g: Butyricicoccus(0.0432), | |
| | | | | | s: Butyricicoccus_{—}pullicaecorum(0.0082) | |
| Ascusb_20688A | 202203086 | Ascusb_20688 | 99.6 | 0.53735 | d: Bacteria(1.0000), p: “Tenericutes”(1.0000), c: Mollicutes(1.0000), | 4411 |
| | | | | | o: Anaeroplasmatales(1.0000), f: Anaeroplasmataceae(1.0000), g: Anaeroplasma(1.0000), | |
| | | | | | s: Anaeroplasma_{—}varium(0.9300) | |
| Ascusb_1720A | 202203086 | Ascusb_1720 | 99.6 | 0.75746 | d: Bacteria(1.0000), p: “Tenericutes”(1.0000), c: Mollicutes(10000), | 4412 |
| | | | | | o: Anaeroplasmatales(1.0000), f: Anaeroplasmataceae(1.0000), g: Anaeroplasma(1.0000), | |
| | | | | | s: Anaeroplasma_{—}varium(0.8900) | |
| Ascusb_265A | 202203086 | Ascusb_265 | 99.1 | 0.78917 | d: Bacteria(1.0000), p: “Tenericutes”(1.0000), c: Mollicutes(1.0000), | 4413 |
| | | | | | o: Anaeroplasmatales(1.0000), f: Anaeroplasmataceae(1.0000), g: Anaeroplasma(1.0000), | |
| | | | | | s: Anaeroplasma_{—}varium(0.9500) | |
| Ascusb_2594C | 202203086 | Ascusb_2594 | 100 | 0.69344 | d: Bacteria(1.0000), p: “Spirochaetes”(0.8800), c: Spirochaetia(0.7744), | 4414 |
| | | | | | o: Spirochaetales(0.6815), f: Spirochaetaceae(0.5997), g: Treponema(0.5277), | |
| | | | | | s: Treponema_{—}bryantii(0.3800) | |
| Ascusb_5320A | 202203086 | Ascusb_5320 | 98.7 | 0.52203 | d: Bacteria(1.0000), p: Firmicutes(0.7300), c: Bacilli(0.4526), | 4415 |
| | | | | | o: Lactobacillo.2082), f: Lactobacillus(0.0874), g: Lactobacillus(0.0306), | |
| | | | | | s: Lactobacillus_{—}manihotivorans(0.0034) | |
| Ascusb_1147B | 202203086 | Ascusb_1147 | 100 | 0.62896 | d: Bacteria(1.0000), p: “Bacteroidetes”(0.9500), c: “Bacteroidia”(0.3325), | 4416 |
| | | | | | o: “Bacteroidales”(0.1164), f: “Porphyromonadaceae”(0.0303), g: Barnesiella(0.0033), | |
| | | | | | s: Barnesiella_{—}viscericola(0.0003) | |
| Ascusb_4552B | 202203086 | Ascusb_4552 | 99.6 | 0.53863 | d: Bacteria(1.0000), p: “Bacteroidetes”(1.0000), c: “Bacteroidia”(1.0000), | 4417 |
| | | | | | o: “Bacteroidales”(1.0000), f: “Prevotellaceae”(0.9900), g: Prevotella(0.9801), | |
| | | | | | s: Prevotella_{—}brevis(0.9409) | |
| Ascusb_2272C | 202203086 | Ascusb_2272 | 99.1 | 0.55338 | d: Bacteria(1.0000), p: “Bacteroidetes”(0.9700), c: “Bacteroidia”(0.8924), | 4418 |
| | | | | | o: “Bacteroidales”(0.8210), f: “Prevotellaceae”(0.7225), g: Prevotella(0.6358), | |
| | | | | | s: Prevotella_{—}brevis(0.2098) | |
| Ascusb_9859B | 202203086 | Ascusb_9859 | 97.8 | 0.6419 | d: Bacteria(1.0000), p: “Proteobacteria”(0.3300), c: Alphaproteobacteria(0.0825), | 4419 |
| | | | | | o: Sphingomonadales(0.0190), f: Sphingomonadaceae(0.0040), g: Sphingomonas(0.0006), | |
| | | | | | s: Sphingomonas_{—}mucosissima(0.0001) | |
| Ascusb_4154A | 202203086 | Ascusb_4154 | 97.8 | 0.59784 | d: Bacteria(1.0000), p: “Bacteroidetes”(0.7400), c: “Bacteroidia”(0.2960), | 4420 |
| | | | | | o: “Bacteroidales”(0.1184), f: Prolixibacteraceae(0.0130), g: Meniscus(0.0009), | |
| | | | | | s: Meniscus_{—}glaucopis(0.0001) | |
| Ascusb_3469A | 202203086 | Ascusb_3469 | 97.8 | 0.47009 | d: Bacteria(1.0000), p: “Bacteroidetes”(0.9400), c: “Bacteroidia”(0.8742), | 4421 |
| | | | | | o: “Bacteroidales”(0.8130), f: “Prevotellaceae”(0.5935), g: Prevotella(0.4333), | |
| | | | | | s: Prevotella_{—}shahii(0.1300) | |
| Ascusb_688C | 202203086 | Ascusb_688 | 99.1 | 0.66709 | d: Bacteria(1.0000), p: “Bacteroidetes”(1.0000), c: “Bacteroidia”(0.9800), | 4422 |
| | | | | | o: “Bacteroidales”(0.9604), f: “Prevotellaceae”(0.8932), g: Prevotella(0.8306), | |
| | | | | | s: Prevotella_{—}ruminicola(0.6479) | |
| Ascusb_19458A | 202203086 | Ascusb_19458 | 99.6 | 0.46749 | d: Bacteria(1.0000), p: “Bacteroidetes”(1.0000), c: “Bacteroidia”(1.0000), | 4423 |
| | | | | | o: “Bacteroidales”(1.0000), f: “Prevotellaceae”(1.0000), g: Prevotella(1.0000), | |
| | | | | | s: Prevotella_{—}ruminicola(0.9800) | |
| Ascusb_2680A | 202203086 | Ascusb_2680 | 98.7 | 0.54546 | d: Bacteria(1.0000), p: Firmicutes(1.0000), c: Clostridia(1.0000), | 4424 |
| | | | | | o: Clostridiales(1.0000), f: Lachnospiraceae(0.9800), g: Blautia(0.8036), | |
| | | | | | s: Blautia_{—}hansenii(0.3938) | |
| Ascusb_3590B | 202203086 | Ascusb_3590 | 100 | 0.53769 | d: Bacteria(1.0000), p: “Bacteroidetes”(1.0000), c: “Bacteroidia”(1.0000), | 4425 |
| | | | | | o: “Bacteroidales”(1.0000), f: “Prevotellaceae”(0.8100), g: Prevotella(0.6480), | |
| | | | | | s: Prevotella_{—}brevis(0.3823) | |
| Ascusb_21D | 202203086 | Ascusb_21 | 99.1 | 0.76005 | d: Bacteria(1.0000), p: “Bacteroidetes”(1.0000), c: “Bacteroidia”(1.0000), | 4426 |
| | | | | | o: “Bacteroidales”(1.0000), f: “Prevotellaceae”(1.0000), g: Prevotella(1.0000), | |
| | | | | | s: Prevotella_{—}copri(0.3600) | |
| Ascusb_17947D | 202203086 | Ascusb_17947 | 98.7 | 0.5943 | d: Bacteria(1.0000), p: “Bacteroidetes”(1.0000), c: “Bacteroidia”(0.9900), | 4427 |
| | | | | | o: “Bacteroidales”(0.9801), f: “Prevotellaceae”(0.9703), g: Prevotella(0.9606), | |
| | | | | | s: Prevotella_{—}copri(0.3938) | |
| Ascusb_987B | 202203086 | Ascusb_987 | 98.7 | 0.64514 | d: Bacteria(1.0000), p: “Bacteroidetes”(0.7800), c: “Bacteroidia”(0.4602), | 4428 |
| | | | | | o: “Bacteroidales”(0.2715), f: “Rikenellaceae”(0.0842), g: Alistipes(0.0160), | |
| | | | | | s: Alistipes_{—}shahii(0.0021) | |
| Ascusb_10845B | 202203086 | Ascusb_10845 | 99.6 | 0.8353 | d: Bacteria(1.0000), p: Firmicutes(0.8000), c: Clostridia(0.6240), | 4429 |
| | | | | | o: Clostridiales(0.4867), f: Lachnospiraceae(0.2044), g: Lachnospiracea_{—}incertae_{—}sedis(0.0552), | |
| | | | | | s: Eubacterium_{—}xylanophilum(0.0149) | |
| Ascusb_3680A | 202203086 | Ascusb_3680 | 98.2 | 0.515 | d: Bacteria(1.0000), p: “Bacteroidetes”(0.7700), c: “Bacteroidia”(0.3234), | 4430 |
| | | | | | o: “Bacteroidales”(0.1358), f: Prolixibacteraceae(0.0177), g: Meniscus(0.0014), | |
| | | | | | s: Meniscus_{—}glaucopis(0.0001) | |
| Ascusb_1626A | 202203086 | Ascusb_1626 | 98.2 | 0.4941 | d: Bacteria(1.0000), p: “Bacteroidetes”(0.7300), c: “Bacteroidia”(0.3066), | 4431 |
| | | | | | o: “Bacteroidales”(0.1288), f: Prolixibacteraceae(0.0142), g: Meniscus(0.0011), | |
| | | | | | s: Meniscus_{—}glaucopis(0.0001) | |
| Ascusb_14905A | 202203086 | Ascusb_14905 | 99.6 | 0.48455 | d: Bacteria(1.0000), p: “Bacteroidetes”(1.0000), c: “Bacteroidia”(1.0000), | 4432 |
| | | | | | o: “Bacteroidales”(1.0000), f: “Prevotellaceae”(0.8600), g: Prevotella(0.7310), | |
| | | | | | s: Prevotella_{—}brevis(0.5921) | |
| Ascusb_464A | 202203086 | Ascusb_464 | 98.7 | 0.82134 | d: Bacteria(1.0000), p: Firmicutes(0.6400), c: Clostridia(0.3968), | 4433 |
| | | | | | o: Clostridiales(0.2460), f: Ruminococcaceae(0.0492), g: Hydrogenoanaerobacterium(0.0059), | |
| | | | | | s: Hydrogenoanaerobacterium_{—}saccharovorans(0.0007) | |
| Ascusb_197B | 202203086 | Ascusb_197 | 100 | 0.59567 | d: Bacteria(1.0000), p: Firmicutes(0.7100), c: Clostridia(0.4686), | 4434 |
| | | | | | o: Clostridiales(0.2812), f: Ruminococcaceae(0.0619), g: Clostridium_IV(0.0043), | |
| | | | | | s: Clostridium_{—}cellulosi(0.0003) | |
| Ascusb_1665B | 202203086 | Ascusb_1665 | 99.1 | 0.58014 | d: Bacteria(1.0000), p: “Bacteroidetes”(0.9300), c: Flavobacteriia(0.4278), | 4435 |
| | | | | | o: “Flavobacteriales”(0.1968), f: Flavobacteriaceae(0.0767), g: Salinimicrobium(0.0077), | |
| | | | | | s: Salinimicrobiummarinum(0.0007) | |
| Ascusb_2516B | 202203086 | Ascusb_2516 | 98.2 | 0.57796 | d: Bacteria(1.0000), p: “Bacteroidetes”(0.9700), c: Flavobacteriia(0.5432), | 4436 |
| | | | | | o: “Flavobacteriales”(0.3042), f: Cryomorphaceae(0.0821), g: Fluviicola(0.0107), | |
| | | | | | s: Fluviicola_{—}taffensis(0.0014) | |
| Ascusb_5764A | 202203086 | Ascusb_5764 | 97.8 | 0.48763 | d: Bacteria(1.0000), p: “Fibrobacteres”(0.3600), c: “Fibrobacteria”(0.1296), | 4437 |
| | | | | | o: “Fibrobacterales”(0.0467), f: “Fibrobacteraceae”(0.0168), g: Fibrobacter(0.0060), | |
| | | | | | s: Fibrobacter_{—}intestinalis(0.0014) | |
| Ascusb_3082A | 202203086 | Ascusb_3082 | 100 | 0.64193 | d: Bacteria(1.0000), p: Firmicutes(0.7600), c: Clostridia(0.4940), | 4438 |
| | | | | | o: Clostridiales(0.3112), f: Ruminococcaceae(0.0809), g: Hydrogenoanaerobacterium(0.0105), | |
| | | | | | s: Hydrogenoanaerobacterium_{—}saccharovorans(0.0014) | |
| Ascusb_108B | 202203086 | Ascusb_108 | 98.7 | 0.75915 | d: Bacteria(1.0000), p: Firmicutes(0.9600), c: Clostridia(0.9216), | 4439 |
| | | | | | o: Clostridiales(0.8847), f: Lachnospiraceae(0.8493), g: Shuttleworthia(0.1359), | |
| | | | | | s: Shuttleworthia_{—}satelles(0.0217) | |
| Ascusb_2792C | 202203086 | Ascusb_2792 | 99.1 | 0.66136 | d: Bacteria(1.0000), p: Firmicutes(0.8400), c: Erysipelotrichia(0.3024), | 4440 |
| | | | | | o: Erysipelotrichales(0.1089), f: Erysipelotrichaceae(0.0392), g: Turicibacter(0.0086), | |
| | | | | | s: Turicibacter_{—}sanguinis(0.0019) | |
| Ascusb_3321A | 202203086 | Ascusb_3321 | 98.7 | 0.53807 | d: Bacteria(1.0000), p: Firmicutes(0.7000), c: Clostridia(0.2800), | 4441 |
| | | | | | o: Clostridiales(0.1120), f: Clostridiaceae_1(0.0246), g: Proteiniclasticum(0.0012), | |
| | | | | | s: Proteiniclasticum_{—}ruminis(0.0001) | |
| Ascusb_1161B | 202203086 | Ascusb_1161 | 100 | 0.497 | d: Bacteria(1.0000), p: Firmicutes(0.8700), c: Erysipelotrichia(0.6090), | 4442 |
| | | | | | o: Erysipelotrichales(0.4263), f: Erysipelotrichaceae(0.2984), g: Solobacterium(0.1194), | |
| | | | | | s: Solobacterium_{—}moorei(0.0477) | |
| Ascusb_738A | 202203086 | Ascusb_738 | 99.1 | 0.63888 | d: Bacteria(1.0000), p: Firmicutes(1.0000), c: Clostridia(1.0000), | 4443 |
| | | | | | o: Clostridiales(1.0000), f: Lachnospiraceae(1.0000), g: Lachnospiracea_{—}incertae_{—}sedis(0.3900), | |
| | | | | | s: Eubacterium_{—}ventriosum(0.1131) | |
| Ascusb_15659B | 202203086 | Ascusb_15659 | 100 | 0.44483 | d: Bacteria(1.0000), p: “Bacteroidetes”(0.9800), c: “Bacteroidia”(0.6272), | 4444 |
| | | | | | o: “Bacteroidales”(0.4014), f: Bacteroidaceae(0.1285), g: Bacteroides(0.0411), | |
| | | | | | s: Bacteroides_{—}barnesiae(0.0107) | |
| Ascusb_379B | 202203086 | Ascusb_379 | 100 | 0.58642 | d: Bacteria(1.0000), p: “Bacteroidetes”(1.0000), c: “Bacteroidia”(1.0000), | 4445 |
| | | | | | o: “Bacteroidales”(1.0000), f: “Prevotellaceae”(0.9300), g: Prevotella(0.8649), | |
| | | | | | s: Prevotella_{—}ruminicola(0.6919) | |
| Ascusb_3326B | 202203086 | Ascusb_3326 | 99.6 | 0.75986 | d: Bacteria(1.0000), p: Firmicutes(0.4600), c: Bacilli(0.1564), | 4446 |
| | | | | | o: Bacillales(0.0297), f: Staphylococcaceae(0.0045), g: Staphylococcus(0.0006), | |
| | | | | | s: Staphylococcusrostri(0.0000) | |
| Ascusb_740A | 202203086 | Ascusb_740 | 100 | 0.63291 | d: Bacteria(1.0000), p: Firmicutes(0.8700), c: Clostridia(0.6525), | 4447 |
| | | | | | o: Clostridiales(0.4567), f: Ruminococcaceae(0.1233), g: Clostridium_III(0.0259), | |
| | | | | | s: Clostridium_{—}cellobioparum(0.0023) | |
| Ascusb_2413B | 202203086 | Ascusb_2413 | 98.7 | 0.59409 | d: Bacteria(1.0000), p: “Bacteroidetes”(1.0000), c: “Bacteroidia”(0.9600), | 4448 |
| | | | | | o: “Bacteroidales”(0.9216), f: Bacteroidaceae(0.8479), g: Bacteroides(0.7800), | |
| | | | | | s: Bacteroides_{—}coprocola(0.2886) | |
| Ascusb_15001A | 202203086 | Ascusb_15001 | 99.6 | 0.5776 | d: Bacteria(1.0000), p: Firmicutes(0.8900), c: Clostridia(0.7209), | 4449 |
| | | | | | o: Clostridiales(0.5407), f: Ruminococcaceae(0.1946), g: Clostridium_III(0.0564), | |
| | | | | | s: Clostridium_{—}hungatei(0.0068) | |
| Ascusb_13183A | 202203086 | Ascusb_13183 | 97.3 | 0.433 | d: Bacteria(1.0000), p: Firmicutes(0.9500), c: Clostridia(0.8170), | 4450 |
| | | | | | o: Clostridiales(0.6618), f: Clostridiales_Incertae_Sedis_IV(0.1125), g: Caldicoprobacter(0.0191) | |
| Ascusb_429A | 202203086 | Ascusb_429 | 99.6 | 0.51664 | d: Bacteria(1.0000), p: “Bacteroidetes”(0.8800), c: “Bacteroidia”(0.7216), | 4451 |
| | | | | | o: “Bacteroidales”(0.5917), f: Bacteroidaceae(0.3550), g: Bacteroides(0.2130) | |
| Ascusb_19080B | 202203086 | Ascusb_19080 | 99.1 | 0.68292 | d: Bacteria(1.0000), p: “Bacteroidetes”(1.0000), c: “Bacteroidia”(1.0000), | 4452 |
| | | | | | o: “Bacteroidales”(1.0000), f: “Prevotellaceae”(0.9500), g: Prevotella(0.9025), | |
| | | | | | s: Prevotella_{—}brevis(0.7491) | |
| Ascusb_888B | 202203086 | Ascusb_888 | 100 | 0.59563 | d: Bacteria(1.0000), p: Firmicutes(0.5600), c: Clostridia(0.2744), | 4453 |
| | | | | | o: Clostridiales(0.1345), f: Ruminococcaceae(0.0282), g: Hydrogenoanaerobacterium(0.0054), | |
| | | | | | s: Hydrogenoanaerobacterium_{—}saccharovorans(0.0010) | |
| Ascusb_15117C | 202203086 | Ascusb_15117 | 100 | 0.57647 | d: Bacteria(1.0000), p: “Bacteroidetes”(1.0000), c: “Bacteroidia”(0.9700), | 4454 |
| | | | | | o: “Bacteroidales”(0.9409), f: “Prevotellaceae”(05928), g: Prevotella(0.3734), | |
| | | | | | s: Prevotella_{—}brevis(0.1942) | |
| Ascusb_10375B | 202203086 | Ascusb_10375 | 99.1 | 0.51924 | d: Bacteria(1.0000), p: “Bacteroidetes”(0.9800), c: “Bacteroidia”(0.9310), | 4455 |
| | | | | | o: “Bacteroidales”(0.8844), f: “Prevotellaceae”(0.5660), g: Prevotella(0.3623), | |
| | | | | | s: Prevotella_{—}brevis(0.1703) | |
| Ascusb_10976C | 202203086 | Ascusb_10976 | 98.7 | 0.4498 | d: Bacteria(1.0000), p: “Bacteroidetes”(0.9900), c: “Bacteroidia”(0.9504), | 4456 |
| | | | | | o: “Bacteroidales”(0.9124), f: “Prevotellaceae”(0.5474), g: Prevotella(0.3285), | |
| | | | | | s: Prevotella_{—}brevis(0.1577) | |
| Ascusb_15111C | 202203086 | Ascusb_15111 | 98.7 | 0.59032 | d: Bacteria(1.0000), p: “Bacteroidetes”(0.9900), c: “Bacteroidia”(0.9504), | 4457 |
| | | | | | o: “Bacteroidales”(0.9124), f: “Prevotellaceae”(0.5839), g: Prevotella(0.3737), | |
| | | | | | s: Prevotella_{—}brevis(0.1794) | |
| Ascusb_318C | 202203086 | Ascusb_318 | 99.6 | 0.74628 | d: Bacteria(1.0000), p: “Tenericutes”(0.6400), c: Mollicutes(04096), | 4458 |
| | | | | | o: Anaeroplasmatales(0.2048), f: Anaeroplasmataceae(0.1024), g: Anaeroplasma(0.0512), | |
| | | | | | s: Anaeroplasma_{—}varium(0.0128) | |
| Ascusb_18705B | 202203086 | Ascusb_18705 | 97.8 | 0.79432 | d: Bacteria(1.0000), p: Firmicutes(0.8400), c: Clostridia(0.6636), | 4459 |
| | | | | | o: Clostridiales(0.5242), f: Ruminococcaceae(0.1206), g: Butyricicoccus(0.0121), | |
| | | | | | s: Butyricicoccus_{—}pullicaecorum(0.0012) | |
| Ascusb_1588B | 202203086 | Ascusb_1588 | 99.1 | 0.65608 | d: Bacteria(1.0000), p: “Bacteroidetes”(0.9700), c: Flavobacteriia(0.4947), | 4460 |
| | | | | | o: “Flavobacteriales”(0.2523), f: Cryomorphaceae(0.0656), g: Fluviicola(0.0112), | |
| | | | | | s: Fluviicola_{—}taffensis(0.0019) | |
| Ascusb_9933B | 202203086 | Ascusb_9933 | 99.1 | 0.60831 | d: Bacteria(1.0000), p: “Bacteroidetes”(1.0000), c: “Bacteroidia”(0.9800), | 4461 |
| | | | | | o: “Bacteroidales”(0.9604), f: Bacteroidaceae(0.9220), g: Bacteroides(0.8851), | |
| | | | | | s: Bacteroides_{—}coprocola(0.3009) | |
| Ascusb_4663B | 202203086 | Ascusb_4663 | 97.8 | 0.48011 | d: Bacteria(1.0000), p: Firmicutes(0.7100), c: Clostridia(0.4615), | 4462 |
| | | | | | o: Clostridiales(0.2769), f: Ruminococcaceae(0.0775), g: Clostridium_IV(0.0085), | |
| | | | | | s: Clostridium_{—}cellulosi(0.0009) | |
| Ascusb_338C | 202203086 | Ascusb_338 | 97.3 | 0.55013 | d: Bacteria(1.0000), p: Firmicutes(0.9600), c: Clostridia(0.9216), | 4463 |
| | | | | | o: Clostridiales(0.8847), f: Lachnospiraceae(0.8051), g: Lachnospiracea_{—}incertae_{—}sedis(0.4992), | |
| | | | | | s: Eubacterium_{—}ruminantium(0.2945) | |
| Ascusb_6110B | 202203086 | Ascusb_6110 | 97.3 | 0.53627 | d: Bacteria(1.0000), p: Firmicutes(0.6500), c: Clostridia(0.3510), | 4464 |
| | | | | | o: Clostridiales(0.1755), f: Clostridiaceae_1(0.0211), g: Proteiniclasticum(0.0011), | |
| | | | | | s: Proteiniclasticum_{—}ruminis(0.0001) | |
| Ascusb_3141A | 202203086 | Ascusb_3141 | 97.8 | 0.55174 | d: Bacteria(1.0000), p: Firmicutes(0.9900), c: Clostridia(0.9801), | 4465 |
| | | | | | o: Clostridiales(0.9703), f: Lachnospiraceae(0.8830), g: Butyrivibrio(0.6269), | |
| | | | | | s: Butyrivibrio_{—}proteoclasticus(0.2069) | |
| Ascusb_2027C | 202203086 | Ascusb_2027 | 98.7 | 0.62292 | d: Bacteria(1.0000), p: “Bacteroidetes”(0.9900), c: “Bacteroidia”(0.9405), | 4466 |
| | | | | | o: “Bacteroidales”(0.8935), f: “Prevotellaceae”(0.5182), g: Prevotella(0.2487), | |
| | | | | | s: Prevotella_{—}brevis(0.1020) | |
| Ascusb_724C | 202203086 | Ascusb_724 | 98.2 | 0.60624 | d: Bacteria(1.0000), p: “Bacteroidetes”(0.9900), c: “Bacteroidia”(0.9702), | 4467 |
| | | | | | o: “Bacteroidales”(0.9508), f: “Prevotellaceae”(0.5705), g: Prevotella(0.3081), | |
| | | | | | s: Prevotella_{—}brevis(0.1386) | |
| Ascusb_2786C | 202203086 | Ascusb_2786 | 97.8 | 0.6298 | d: Bacteria(1.0000), p: “Bacteroidetes”(0.9400), c: Flavobacteriia(0.5264), | 4468 |
| | | | | | o: “Flavobacteriales”(0.2948), f: Flavobacteriaceae(0.1474), g: Lutibacter(0.0147), | |
| | | | | | s: Lutibacter_{—}flavus(0.0015) | |
| Ascusb_514C | 202203086 | Ascusb_514 | 98.7 | 0.67484 | d: Bacteria(1.0000), p: Firmicutes(0.9400), c: Clostridia(0.7708), | 4469 |
| | | | | | o: Clostridiales(0.6012), f: Ruminococcaceae(0.2706), g: Clostridium_III(0.1028), | |
| | | | | | s: Clostridium_{—}termitidis(0.0226) | |
| Ascusb_4119D | 202203086 | Ascusb_4119 | 97.3 | 0.61021 | d: Bacteria(1.0000), p: Firmicutes(0.9400), c: Clostridia(0.7802), | 4470 |
| | | | | | o: Clostridiales(0.5930), f: Ruminococcaceae(0.3321), g: Clostridium_III(0.1461), | |
| | | | | | s: Clostridium_{—}termitidis(0.0438) | |
| Ascusb_3973A | 202203086 | Ascusb_3973 | 97.8 | 0.47163 | d: Bacteria(1.0000), p: Firmicutes(0.9300), c: Clostridia(0.8463), | 4471 |
| | | | | | o: Clostridiales(0.7701), f: Lachnospiraceae(0.5930), g: Clostridium_XIVa(0.2135), | |
| | | | | | s: Clostridium_{—}xylanovorans(0.0299) | |
| Ascusb_2442B | 202203086 | Ascusb_2442 | 97.3 | 0.5696 | d: Bacteria(1.0000), p: Cyanobacteria/Chloroplast(0.2800), c: Cyanobacteria(0.0504), | 4472 |
| | | | | | f: Family_XII(0.0066), g: GpXII(0.0009) | |
| Ascusb_431B | 202203086 | Ascusb_431 | 97.3 | 0.65671 | d: Bacteria(1.0000), p: Firmicutes(0.8500), c: Clostridia(0.5185), | 4473 |
| | | | | | o: Clostridiales(0.3163), f: Ruminococcaceae(0.1487), g: Butyricicoccus(0.0297), | |
| | | | | | s: Butyricicoccus_{—}pullicaecorum(0.0059) | |
| Ascusb_847C | 202203086 | Ascusb_847 | 97.8 | 0.67727 | d: Bacteria(1.0000), p: Firmicutes(0.9100), c: Clostridia(0.8190), | 4474 |
| | | | | | o: Clostridiales(0.7371), f: Lachnospiraceae(0.6339), g: Clostridium_XIVa(0.3106), | |
| | | | | | s: Clostridium_{—}fimetarium(0.1180) | |
| Ascusb_896B | 202203086 | Ascusb_896 | 98.7 | 0.50845 | d: Bacteria(1.0000), p: Firmicutes(0.8700), c: Clostridia(0.7569), | 4475 |
| | | | | | o: Clostridiales(0.6585), f: Lachnospiraceae(0.5466), g: Syntrophococcus(0.1968), | |
| | | | | | s: Syntrophococcus_{—}sucromutans(0.0708) | |
| Ascusb_3868B | 202203086 | Ascusb_3868 | 99.1 | 0.45317 | d: Bacteria(1.0000), p: “Bacteroidetes”(1.0000), c: “Bacteroidia”(0.9600), | 4476 |
| | | | | | o: “Bacteroidales”(0.9216), f: Bacteroidaceae(0.8387), g: Bacteroides(0.7632), | |
| | | | | | s: Bacteroides_{—}coprocola(0.2518) | |
| Ascusb_917B | 202203086 | Ascusb_917 | 100 | 0.61858 | d: Bacteria(1.0000), p: Firmicutes(0.6100), c: Clostridia(0.1525), | 4477 |
| | | | | | o: Clostridiales(0.0381), f: Lachnospiraceae(0.0084), g: Lachnospiracea_{—}incertae_{—}sedis(0.0010), | |
| | | | | | s: Eubacterium_{—}ventriosum(0.0001) | |
| Ascusb_1379B | 202203086 | Ascusb_1379 | 100 | 0.56455 | d: Bacteria(1.0000), p: “Bacteroidetes”(1.0000), c: “Bacteroidia”(0.9900), | 4478 |
| | | | | | o: “Bacteroidales”(0.9801), f: “Prevotellaceae”(0.8821), g: Prevotella(0.7939), | |
| | | | | | s: Prevotella_{—}brevis(0.6351) | |
| Ascusb_1305B | 202203086 | Ascusb_1305 | 98.7 | 0.51127 | d: Bacteria(1.0000), p: Firmicutes(0.9400), c: Clostridia(0.8836), | 4479 |
| | | | | | o: Clostridiales(0.8306), f: Lachnospiraceae(0.7060), g: Lachnospiracea_{—}incertae_{—}sedis(0.2542), | |
| | | | | | s: Eubacterium_{—}eligens(0.0712) | |
| Ascusb_589B | 202203086 | Ascusb_589 | 97.8 | 0.51438 | d: Bacteria(1.0000), p: Firmicutes(0.9100), c: Clostridia(0.8281), | 4480 |
| | | | | | o: Clostridiales(0.7536), f: Lachnospiraceae(0.6255), g: Clostridium_XIVa(0.3190), | |
| | | | | | s: Clostridium_{—}bolteae(0.0861) | |
| Ascusb_9116A | 202203086 | Ascusb_9116 | 97.3 | 0.47972 | d: Bacteria(1.0000), p: Firmicutes(0.9800), c: Clostridia(0.9604), | 4481 |
| | | | | | o: Clostridiales(0.9412), f: Lachnospiraceae(0.8471), g: Clostridium_XIVa(0.4744), | |
| | | | | | s: Clostridium_{—}bolteae(0.1518) | |
| Ascusb_799B | 202203086 | Ascusb_799 | 99.6 | 0.70468 | d: Bacteria(1.0000), p: Firmicutes(0.7800), c: Bacilli(0.5382), | 4482 |
| | | | | | o: Lactobacillobacillaceae(0.1372), g: Pediococcus(0.0206), | |
| | | | | | s: Pediococcus_{—}pentosaceus(0.0029) | |
| Ascusb_678B | 202203086 | Ascusb_678 | 99.6 | 0.70481 | d: Bacteria(1.0000), p: Firmicutes(0.7500), c: Bacilli(0.4875), | 4483 |
| | | | | | o: Lactobacillo.2389), f: Lactobacillus(0.1123), g: Pediococcus(0.0180), | |
| | | | | | s: Pediococcus_{—}pentosaceus(0.0025) | |
| Ascusb_560B | 202203086 | Ascusb_560 | 99.6 | 0.71369 | d: Bacteria(1.0000), p: Firmicutes(0.7800), c: Bacilli(0.5460), | 4484 |
| | | | | | o: Lactobacillobacillaceae(0.1476), g: Pediococcus(0.0251), | |
| | | | | | s: Pediococcus_{—}pentosaceus(0.0038) | |
| Ascusb_3969B | 202203086 | Ascusb_3969 | 99.6 | 0.50953 | d: Bacteria(1.0000), p: Firmicutes(0.3300), c: Bacilli(0.0957), | 4485 |
| | | | | | o: Bacillales(0.0220), f: Staphylococcaceae(0.0026), g: Jeotgalicoccus(0.0002), | |
| | | | | | s: Jeotgalicoccus_{—}huakuii(0.0000) | |
| Ascusb_2148A | 202203086 | Ascusb_2148 | 99.6 | 0.45985 | d: Bacteria(1.0000), p: “Bacteroidetes”(1.0000), c: “Bacteroidia”(1.0000), | 4486 |
| | | | | | o: “Bacteroidales”(1.0000), f: “Prevotellaceae”(0.9500), g: Prevotella(0.8930), | |
| | | | | | s: Prevotella_{—}brevis(0.8305) | |
| Ascusb_2590D | 202203086 | Ascusb_2590 | 100 | 0.60511 | d: Bacteria(1.0000), p: “Bacteroidetes”(1.0000), c: “Bacteroidia”(0.9900), | 4487 |
| | | | | | o: “Bacteroidales”(0.9801), f: Bacteroidaceae(0.9703), g: Bacteroides(0.9606), | |
| | | | | | s: Bacteroides_{—}coprocola(0.6244) | |
| Ascusb_21571A | 202203087 | Ascusb_21571 | 99.6 | 0.54211 | d: Bacteria(1.0000), p: “Bacteroidetes”(1.0000), c: “Bacteroidia”(1.0000), | 4488 |
| | | | | | o: “Bacteroidales”(1.0000), f: “Prevotellaceae”(0.9800), g: Prevotella(0.9604), | |
| | | | | | s: Prevotella_{—}brevis(0.8740) | |
| Ascusb_1532B | 202203087 | Ascusb_1532 | 98.2 | 0.5383 | d: Bacteria(1.0000), p: “Bacteroidetes”(0.9700), c: Cytophagia(0.2328), | 4489 |
| | | | | | o: Cytophagales(0.0559), f: Flammeovirgaceae(0.0123), g: Aureibacter(0.0018), | |
| | | | | | s: Aureibacter_{—}tunicatorum(0.0003) | |
| Ascusb_1268A | 202203087 | Ascusb_1268 | 97.3 | 0.69457 | d: Bacteria(1.0000), p: “Spirochaetes”(1.0000), c: Spirochaetia(1.0000), | 4490 |
| | | | | | o: Spirochaetales(1.0000), f: Spirochaetaceae(1.0000), g: Treponema(1.0000), | |
| | | | | | s: Treponema_{—}bryantii(1.0000) | |
| Ascusb_9421B | 202203087 | Ascusb_9421 | 100 | 0.52514 | d: Bacteria(1.0000), p: “Bacteroidetes”(0.6500), c: Sphingobacteriia(0.2145), | 4491 |
| | | | | | o: “Sphingobacteriales”(0.0708), f: Chitinophagaceae(0.0234), g: Cnuella(0.0026), | |
| | | | | | s: Cnuella_{—}takakiae(0.0003) | |
| Ascusb_8024A | 202203086 | Ascusb_8024 | 97.8 | 0.48325 | d: Bacteria(1.0000), p: “Bacteroidetes”(0.9900), c: Flavobacteriia(0.6039), | 4492 |
| | | | | | o: “Flavobacteriales”(0.3684), f: Cryomorphaceae(0.0847), g: Wandonia(0.0195), | |
| | | | | | s: Wandonia_{—}haliotis(0.0045) | |
| Ascusb_3879A | 202203086 | Ascusb_3879 | 97.8 | 0.58991 | d: Bacteria(1.0000), p: “Bacteroidetes”(0.9800), c: Cytophagia(0.2842), | 4493 |
| | | | | | o: Cytophagales(0.0824), f: Flammeovirgaceae(0.0206), g: Aureibacter(0.0049), | |
| | | | | | s: Aureibacter_{—}tunicatorum(0.0012) | |
| Ascusb_9365A | 202203086 | Ascusb_9365 | 99.6 | 0.52446 | d: Bacteria(1.0000), p: “Proteobacteria”(0.4500), c: Alphaproteobacteria(0.1530), | 4494 |
| | | | | | o: Sphingomonadales(0.0505), f: Sphingomonadaceae(0.0162), g: Sphingomonas(0.0027), | |
| | | | | | s: Sphingomonas_{—}daechungensis(0.0002) | |
| Ascusb_21B | 202203086 | Ascusb_21 | 100 | 0.76005 | d: Bacteria(1.0000), p: “Bacteroidetes”(1.0000), c: “Bacteroidia”(1.0000), | 4495 |
| | | | | | o: “Bacteroidales”(1.0000), f: “Prevotellaceae”(1.0000), g: Prevotella(1.0000), | |
| | | | | | s: Prevotella_{—}copri(0.3600) | |
| Ascusb_19172A | 202203086 | Ascusb_19172 | 97.3 | 0.49061 | d: Bacteria(1.0000), p: “Bacteroidetes”(0.9300), c: “Bacteroidia”(0.7812), | 4496 |
| | | | | | o: “Bacteroidales”(0.6562), f: “Porphyromonadaceae”(0.4790), g: Barnesiella(0.2826), | |
| | | | | | s: Barnesiella_{—}viscericola(0.1668) | |
| Ascusb_2294A | 202203086 | Ascusb_2294 | 99.6 | 0.53211 | d: Bacteria(1.0000), p: Firmicutes(0.9900), c: Clostridia(0.9801), | 4497 |
| | | | | | o: Clostridiales(0.9703), f: Clostridiales_Incertae_Sedis_XIII(0.9509), g: Mogibacterium(0.9319), | |
| | | | | | s: Mogibacterium_{—}neglectum(0.6896) | |
| Ascusb_4670A | 202203086 | Ascusb_4670 | 100 | 0.47306 | d: Bacteria(1.0000), p: Firmicutes(0.9800), c: Clostridia(0.9604), | 4498 |
| | | | | | o: Clostridiales(0.9412), f: Lachnospiraceae(0.9035), g: Roseburia(0.2440), | |
| | | | | | s: Roseburia_{—}inulinivorans(0.0585) | |
| Ascusb_18705A | 202203087 | Ascusb_18705 | 98.2 | 0.79432 | d: Bacteria(1.0000), p: Firmicutes(0.8400), c: Clostridia(0.6636), | 4499 |
| | | | | | o: Clostridiales(0.5242), f: Ruminococcaceae(0.1206), g: Butyricicoccus(0.0121), | |
| | | | | | s: Butyricicoccus_{—}pullicaecorum(0.0012) | |
| Ascusb_221A | 202203087 | Ascusb_221 | 99.1 | 0.60333 | d: Bacteria(1.0000), p: “Bacteroidetes”(1.0000), c: “Bacteroidia”(1.0000), | 4500 |
| | | | | | o: “Bacteroidales”(1.0000), f: “Prevotellaceae”(0.6200), g: Prevotella(0.3844), | |
| | | | | | s: Prevotella_{—}ruminicola(0.2114) | |
| Ascusb_1630A | 202203087 | Ascusb_1630 | 100 | 0.51231 | d: Bacteria(1.0000), p: “Bacteroidetes”(1.0000), c: “Bacteroidia”(1.0000), | 4501 |
| | | | | | o: “Bacteroidales”(1.0000), f: “Prevotellaceae”(0.7800), g: Prevotella(0.6084), | |
| | | | | | s: Prevotella_{—}brevis(0.3955) | |
| Ascusb_83A | 202203087 | Ascusb_83 | 100 | 0.5568 | d: Bacteria(1.0000), p: “Bacteroidetes”(1.0000), c: “Bacteroidia”(1.0000), | 4502 |
| | | | | | o: “Bacteroidales”(1.0000), f: “Prevotellaceae”(08100), g: Prevotella(0.6561), | |
| | | | | | s: Prevotella_{—}brevis(0.4133) | |
| Ascusb_2633A | 202203087 | Ascusb_2633 | 99.6 | 0.59178 | d: Bacteria(1.0000), p: “Bacteroidetes”(1.0000), c: “Bacteroidia”(1.0000), | 4503 |
| | | | | | o: “Bacteroidales”(1.0000), f: “Prevotellaceae”(0.8500), g: Prevotella(0.7225), | |
| | | | | | s: Prevotella_{—}brevis(0.4407) | |
| Ascusb_8244A | 202203087 | Ascusb_8244 | 99.1 | 0.51073 | d: Bacteria(1.0000), p: “Bacteroidetes”(1.0000), c: “Bacteroidia”(0.9900), | 4504 |
| | | | | | o: “Bacteroidales”(0.9801), f: “Prevotellaceae”(0.8233), g: Prevotella(0.6916), | |
| | | | | | s: Prevotella_{—}brevis(0.4357) | |
| Ascusb_624A | 202203087 | Ascusb_624 | 100 | 0.49203 | d: Bacteria(1.0000), p: “Bacteroidetes”(1.0000), c: “Bacteroidia”(1.0000), | 4505 |
| | | | | | o: “Bacteroidales”(1.0000), f: “Prevotellaceae”(09500), g: Prevotella(0.9025), | |
| | | | | | s: Prevotella_{—}brevis(0.7220) | |
| Ascusb_5149A | 202203087 | Ascusb_5149 | 100 | 0.57618 | d: Bacteria(1.0000), p: Firmicutes(0.8600), c: Clostridia(0.7138), | 4506 |
| | | | | | o: Clostridiales(0.5925), f: Ruminococcaceae(0.2607), g: Pseudoflavonifractor(0.0391), | |
| | | | | | s: Pseudoflavonifractor_{—}capillosus(0.0059) | |
| Ascusb_344B | 202203087 | Ascusb_344 | 100 | 0.55333 | d: Bacteria(1.0000), p: “Bacteroidetes”(0.7400), c: “Bacteroidia”(0.5180), | 4507 |
| | | | | | o: “Bacteroidales”(0.3626), f: Bacteroidaceae(0.2393), g: Bacteroides(0.1579), | |
| | | | | | s: Bacteroides_{—}finegoldii(0.0205) | |
| Ascusb_2535A | 202203087 | Ascusb_2535 | 99.6 | 0.51215 | d: Bacteria(1.0000), p: Firmicutes(0.8400), c: Clostridia(0.6552), | 4508 |
| | | | | | o: Clostridiales(0.5111), f: Syntrophomonadaceae(0.1278), g: Syntrophomonas(0.0319), | |
| | | | | | s: Syntrophomonas_{—}cellicola(0.0045) | |
| Ascusb_877A | 202203087 | Ascusb_877 | 99.6 | 0.5874 | d: Bacteria(1.0000), p: “Bacteroidetes”(0.8500), c: “Bacteroidia”(0.3910), | 4509 |
| | | | | | o: “Bacteroidales”(0.1799), f: “Rikenellaceae”(0.0486), g: Alistipes(0.0073), | |
| | | | | | s: Alistipesfinegoldii(0.0008) | |
| Ascusb_325B | 202203087 | Ascusb_325 | 99.6 | 0.81619 | d: Bacteria(1.0000), p: Candidatus_Saccharibacteria(0.9200), | 4510 |
| | | | | | g: Saccharibacteria_{—}genera_{—}incertae_{—}sedis(0.8464) | |
| Ascusb_3758B | 202203087 | Ascusb_3758 | 100 | 0.45884 | d: Bacteria(1.0000), p: “Bacteroidetes”(0.9800), c: “Bacteroidia”(0.5488), | 4511 |
| | | | | | o: “Bacteroidales”(0.3073), f: “Porphyromonadaceae”(0.1137), g: Barnesiella(0.0148), | |
| | | | | | s: Barnesiella_{—}viscericola(0.0019) | |
| Ascusb_2378A | 202203087 | Ascusb_2378 | 98.7 | 0.46305 | d: Bacteria(1.0000), p: “Bacteroidetes”(1.0000), c: “Bacteroidia”(1.0000), | 4512 |
| | | | | | o: “Bacteroidales”(1.0000), f: “Prevotellaceae”(0.8300), g: Prevotella(0.6806), | |
| | | | | | s: Prevotella_{—}brevis(0.4288) | |
| Ascusb_150A | 202203087 | Ascusb_150 | 98.7 | 0.49419 | d: Bacteria(1.0000), p: “Bacteroidetes”(0.9800), c: “Bacteroidia”(0.9506), | 4513 |
| | | | | | o: “Bacteroidales”(0.9221), f: “Prevotellaceae”(07377), g: Prevotella(0.5901), | |
| | | | | | s: Prevotella_{—}brevis(0.3423) | |
| Ascusb_1149A | 202203087 | Ascusb_1149 | 99.6 | 0.58282 | d: Bacteria(1.0000), p: “Proteobacteria”(0.6200), c: Alphaproteobacteria(0.1426), | 4514 |
| | | | | | o: Sphingomonadales(0.0114), f: Sphingomonadaceae(0.0009), g: Sphingomicrobium(0.0000), | |
| | | | | | s: Sphingomicrobium_{—}flavum(0.0000) | |
| Ascusb_3011A | 202203087 | Ascusb_3011 | 98.2 | 0.68762 | d: Bacteria(1.0000), p: Firmicutes(0.9300), c: Clostridia(0.8463), | 4515 |
| | | | | | o: Clostridiales(0.7617), f: Lachnospiraceae(0.5256), g: Butyrivibrio(0.1997), | |
| | | | | | s: Butyrivibrio_{—}proteoclasticus(0.0739) | |
| Ascusb_198A | 202203087 | Ascusb_198 | 98. | 0.54315 | d: Bacteria(1.0000), p: “Bacteroidetes”(1.0000), c: “Bacteroidia”(1.0000), | 4516 |
| | | | | | o: “Bacteroidales”(1.0000), f: “Prevotellaceae”(1.0000), g: Prevotella(1.0000), | |
| | | | | | s: Prevotella_{—}brevis(1.0000) | |
| Ascusb_2381A | 202203086 | Ascusb_2381 | 99.1 | 0.61873 | d: Bacteria(1.0000), p: “Tenericutes”(0.2600), c: Mollicutes(0.0676), | 4517 |
| | | | | | o: Entomoplasmatales(0.0128), f: Spiroplasmataceae(0.0024), g: Spiroplasma(0.0005), | |
| | | | | | s: Spiroplasma_{—}taiwanense(0.0000) | |
| Ascusb_7938A | 202203086 | Ascusb_7938 | 97.3 | 0.45517 | d: Bacteria(1.0000), p: Firmicutes(0.4200), c: Bacilli(0.0966), | 4518 |
| | | | | | o: Bacillales(0.0164), f: Staphylococcaceae(0.0016), g: Jeotgalicoccus(0.0001), | |
| | | | | | s: Jeotgalicoccus_{—}huakuii(0.0000) | |
| Ascusb_1882A | 202203086 | Ascusb_1882 | 99.1 | 0.65868 | d: Bacteria(1.0000), p: Firmicutes(0.6600), c: Bacilli(0.3696), | 4519 |
| | | | | | o: Lactobacillustobacillaceae(0.0383), g: Pediococcus(0.0034), | |
| | | | | | s: Pediococcus_{—}pentosaceus(0.0003) | |
| Ascusb_2191B | 202203086 | Ascusb_2191 | 99.6 | 0.61282 | d: Bacteria(1.0000), p: Firmicutes(0.7500), c: Clostridia(0.4875), | 4520 |
| | | | | | o: Clostridiales(0.3120), f: Lachnospiraceae(0.1154), g: Clostridium_XIVa(0.0185), | |
| | | | | | s: Clostridium_{—}glycyrrhizinilyticum(0.0018) | |
| Ascusb_620A | 202203086 | Ascusb_620 | 99.1 | 0.64202 | d: Bacteria(1.0000), p: Firmicutes(0.9100), c: Clostridia(0.8190), | 4521 |
| | | | | | o: Clostridiales(0.7371), f: Lachnospiraceae(0.6339), g: Clostridium_XIVa(0.2979), | |
| | | | | | s: Clostridium_{—}xylanovorans(0.1222) | |
| Ascusb_3160A | 202203086 | Ascusb_3160 | 99.1 | 0.56547 | d: Bacteria(1.0000), p: “Spirochaetes”(1.0000), c: Spirochaetia(1.0000), | 4522 |
| | | | | | o: Spirochaetales(1.0000), f: Spirochaetaceae(1.0000), g: Treponema(1.0000), | |
| | | | | | s: Treponema_{—}bryantii(1.0000) | |
| Ascusb_1776A | 202203086 | Ascusb_1776 | 98.7 | 0.63572 | d: Bacteria(1.0000), p: “Spirochaetes”(1.0000), c: Spirochaetia(1.0000), | 4523 |
| | | | | | o: Spirochaetales(1.0000), f: Spirochaetaceae(1.0000), g: Treponema(1.0000), | |
| | | | | | s: Treponema_{—}bryantii(1.0000) | |
| Ascusb_2924A | 202203086 | Ascusb_2924 | 97.8 | 0.50048 | d: Bacteria(1.0000), p: “Spirochaetes”(1.0000), c: Spirochaetia(1.0000), | 4524 |
| | | | | | o: Spirochaetales(1.0000), f: Spirochaetaceae(1.0000), g: Treponema(1.0000), | |
| | | | | | s: Treponema_{—}bryantii(1.0000) | |
| Ascusb_804A | 202203086 | Ascusb_804 | 100 | 0.65689 | d: Bacteria(1.0000), p: “Bacteroidetes”(0.9800), c: “Bacteroidia”(0.3528), | 4525 |
| | | | | | o: “Bacteroidales”(0.1270), f: “Porphyromonadaceae”(0.0292), g: Barnesiella(0.0050), | |
| | | | | | s: Barnesiella_{—}viscericola(0.0008) | |
| Ascusb_2188A | 202203086 | Ascusb_2188 | 98.7 | 0.53226 | d: Bacteria(1.0000), p: “Bacteroidetes”(0.9800), c: “Bacteroidia”(0.5390), | 4526 |
| | | | | | o: “Bacteroidales”(0.2965), f: “Porphyromonadaceae”(0.0949), g: Barnesiella(0.0133), | |
| | | | | | s: Barnesiella_{—}viscericola(0.0019) | |
| Ascusb_1244A | 202203086 | Ascusb_1244 | 97.8 | 0.70499 | d: Bacteria(1.0000), p: “Spirochaetes”(1.0000), c: Spirochaetia(1.0000), | 4527 |
| | | | | | o: Spirochaetales(1.0000), f: Spirochaetaceae(1.0000), g: Treponema(1.0000), | |
| | | | | | s: Treponema_{—}bryantii(1.0000) | |
| Ascusb_799A | 202203086 | Ascusb_799 | 100 | 0.70468 | d: Bacteria(1.0000), p: Firmicutes(0.7800), c: Bacilli(0.5382), | 4528 |
| | | | | | o: Lactobacillo.2745), f: Lactobacillus(0.1372), g: Pediococcus(0.0206), | |
| | | | | | s: Pediococcus_{—}pentosaceus(0.0029) | |
| Ascusb_678A | 202203086 | Ascusb_678 | 100 | 0.70481 | d: Bacteria(1.0000), p: Firmicutes(0.7500), c: Bacilli(0.4875), | 4529 |
| | | | | | o: Lactobacillo.2389), f: Lactobacilluseae(0.1123), g: Pediococcus(0.0180), | |
| | | | | | s: Pediococcus_{—}pentosaceus(0.0025) | |
| Ascusb_560A | 202203086 | Ascusb_560 | 100 | 0.71369 | d: Bacteria(1.0000), p: Firmicutes(0.7800), c: Bacilli(0.5460), | 4530 |
| | | | | | o: Lactobacillustobacillaceae(0.1476), g: Pediococcus(0.0251), | |
| | | | | | s: Pediococcus_{—}pentosaceus(0.0038) | |
| Ascusb_3689A | 202203086 | Ascusb_3689 | 98.2 | 0.48308 | d: Bacteria(1.0000), p: “Bacteroidetes”(0.8700), c: Flavobacteriia(0.2001), | 4531 |
| | | | | | o: “Flavobacteriales”(0.0460), f: Flavobacteriaceae(0.0097), g: Lutibacter(0.0009), | |
| | | | | | s: Lutibacter_{—}flavus(0.0001) | |
| Ascusb_994A | 202203086 | Ascusb_994 | 97.8 | 0.57602 | d: Bacteria(1.0000), p: Firmicutes(0.7500), c: Clostridia(0.4575), | 4532 |
| | | | | | o: Clostridiales(0.2791), f: Lachnospiraceae(0.0949), g: Clostridium_XIVa(0.0114), | |
| | | | | | s: Clostridium_{—}glycyrrhizinilyticum(0.0011) | |
| Ascusb_5201A | 202203086 | Ascusb_5201 | 98.7 | 0.50458 | d: Bacteria(1.0000), p: “Bacteroidetes”(0.7300), c: “Bacteroidia”(0.3358), | 4533 |
| | | | | | o: “Bacteroidales”(0.1545), f: “Porphyromonadaceae”(0.0386), g: Butyricimonas(0.0042), | |
| | | | | | s: Butyricimonas_{—}faecihominis(0.0004) | |
| Ascusb_3089B | 202203086 | Ascusb_3089 | 97.3 | 0.54157 | d: Bacteria(1.0000), p: Firmicutes(0.7700), c: Clostridia(0.5005), | 4534 |
| | | | | | o: Clostridiales(0.3253), f: Christensenellaceae(0.0260), g: Christensenella(0.0021), | |
| | | | | | s: Christensenella_{—}minuta(0.0002) | |
| Ascusb_2177A | 202203086 | Ascusb_2177 | 97.8 | 0.50654 | d: Bacteria(1.0000), p: “Bacteroidetes”(1.0000), c: Flavobacteriia(0.7500), | 4535 |
| | | | | | o: “Flavobacteriales”(0.5625), f: Flavobacteriaceae(0.3713), g: Frondibacter(0.0408), | |
| | | | | | s: Frondibacter_{—}aureus(0.0045) | |
| Ascusb_5891A | 202203086 | Ascusb_5891 | 100 | 0.7378 | d: Bacteria(1.0000), p: “Tenericutes”(0.1500), c: Mollicutes(0.0225), | 4536 |
| | | | | | o: Entomoplasmatales(0.0029), f: Spiroplasmataceae(0.0004), g: Spiroplasma(0.0000), | |
| | | | | | s: Spiroplasma_{—}taiwanense(0.0000) | |
| Ascusb_8962A | 202203086 | Ascusb_8962 | 97.8 | 0.47136 | d: Bacteria(1.0000), p: Firmicutes(0.4900), c: Bacilli(0.1274), | 4537 |
| | | | | | o: Lactobacillo.0242), f: Leuconostocaceae(0.0017), g: Leuconostoc(0.0001), | |
| | | | | | s: Leuconostoc_{—}gelidum_subsp._aenigmaticum(0.0000) | |
| Ascusb_3705A | 202203086 | Ascusb_3705 | 97.3 | 0.7708 | d: Bacteria(1.0000), p: Firmicutes(0.5400), c: Bacilli(0.2052), | 4538 |
| | | | | | o: Lactobacillustobacillaceae(0.0156), g: Pediococcus(0.0022), | |
| | | | | | s: Pediococcus_{—}ethanolidurans(0.0003) | |
| Ascusb_2594A | 202203086 | Ascusb_2594 | 99.1 | 0.69344 | d: Bacteria(1.0000), p: “Spirochaetes”(0.8800), c: Spirochaetia(0.7744), | 4539 |
| | | | | | o: Spirochaetales(0.6815), f: Spirochaetaceae(0.5997), g: Treponema(0.5277), | |
| | | | | | s: Treponema_{—}bryantii(0.3800) | |
| Ascusb_18804A | 202203086 | Ascusb_18804 | 99.6 | 0.49229 | d: Bacteria(1.0000), p: “Bacteroidetes”(0.9800), c: “Bacteroidia”(0.9604), | 4540 |
| | | | | | o: “Bacteroidales”(0.9412), f: “Prevotellaceae”(0.5930), g: Prevotella(0.3676), | |
| | | | | | s: Prevotella_{—}corporis(0.0882) | |
| Ascusb_344A | 202203086 | Ascusb_344 | 99.6 | 0.55333 | d: Bacteria(1.0000), p: “Bacteroidetes”(0.7400), c: “Bacteroidia”(0.5180), | 4541 |
| | | | | | o: “Bacteroidales”(0.3626), f: Bacteroidaceae(0.2393), g: Bacteroides(0.1579), | |
| | | | | | s: Bacteroides_{—}finegoldii(0.0205) | |
| Ascusb_3349A | 202203086 | Ascusb_3349 | 98.2 | 0.49172 | d: Bacteria(1.0000), p: Firmicutes(0.9100), c: Bacilli(0.7098), | 4542 |
| | | | | | o: Bacillales(0.3691), f: Paenibacillaceae_1(0.1218), g: Paenibacillus(0.0317), | |
| | | | | | s: Paenibacillus_{—}mendelii(0.0022) | |
| Ascusb_317A | 202203086 | Ascusb_317 | 99.6 | 0.6566 | d: Bacteria(1.0000), p: Firmicutes(1.0000), c: Clostridia(1.0000), | 4543 |
| | | | | | o: Clostridiales(1.0000), f: Lachnospiraceae(0.9900), g: Lachnospiracea_{—}incertae_{—}sedis(0.8910), | |
| | | | | | s: Eubacterium_{—}hallii(0.7930) | |
| Ascusb_2425A | 202203086 | Ascusb_2425 | 99.6 | 0.51077 | d: Bacteria(1.0000), p: “Bacteroidetes”(0.9000), c: “Bacteroidia”(0.7380), | 4544 |
| | | | | | o: “Bacteroidales”(0.6052), f: Bacteroidaceae(0.3389), g: Bacteroides(0.1898) | |
| Ascusb_1661A | 202203087 | Ascusb_1661 | 98.2 | 0.58188 | d: Bacteria(1.0000), p: “Bacteroidetes”(1.0000), c: “Bacteroidia”(1.0000), | 4545 |
| | | | | | o: “Bacteroidales”(1.0000), f: “Prevotellaceae”(0.9900), g: Prevotella(0.9801), | |
| | | | | | s: Prevotella_{—}brevis(0.9507) | |
| Ascusb_7297B | 202203087 | Ascusb_7297 | 98.7 | 0.53471 | d: Bacteria(1.0000), p: Firmicutes(0.9500), c: Clostridia(0.8835), | 4546 |
| | | | | | o: Clostridiales(0.8217), f: Lachnospiraceae(0.7231), g: Lachnospiracea_{—}incertae_{—}sedis(0.3688), | |
| | | | | | s: Eubacterium_{—}eligens(0.0885) | |
| Ascusb_991A | 202203087 | Ascusb_991 | 99.6 | 0.66674 | d: Bacteria(1.0000), p: “Bacteroidetes”(0.8700), c: “Bacteroidia”(0.3915), | 4547 |
| | | | | | o: “Bacteroidales”(0.1762), f: “Porphyromonadaceae”(0.0546), g: Parabacteroides(0.0104), | |
| | | | | | s: Parabacteroides_{—}distasonis(0.0019) | |
| Ascusb_275A | 202203087 | Ascusb_275 | 97.8 | 0.79302 | d: Bacteria(1.0000), p: “Synergistetes”(0.1300), c: Synergistia(0.0169), | 4548 |
| | | | | | o: Synergistales(0.0022), f: Synergistaceae(0.0003), g: Aminiphilus(0.0000), | |
| | | | | | s: Aminiphilus_{—}circumscriptus(0.0000) | |
| Ascusb_3264B | 202203087 | Ascusb_3264 | 98.7 | 0.63261 | d: Bacteria(1.0000), p: “Bacteroidetes”(1.0000), c: “Bacteroidia”(1.0000), | 4549 |
| | | | | | o: “Bacteroidales”(1.0000), f: Bacteroidaceae(0.9900), g: Bacteroides(0.9801), | |
| | | | | | s: Bacteroides_{—}uniformis(0.4900) | |
| Ascusb_2272A | 202203087 | Ascusb_2272 | 98.2 | 0.55338 | d: Bacteria(1.0000), p: “Bacteroidetes”(0.9700), c: “Bacteroidia”(0.8924), | 4550 |
| | | | | | o: “Bacteroidales”(0.8210), f: “Prevotellaceae”(0.7225), g: Prevotella(0.6358), | |
| | | | | | s: Prevotella_{—}brevis(0.2098) | |
| Ascusb_3013A | 202203087 | Ascusb_3013 | 99.6 | 0.47875 | d: Bacteria(1.0000), p: “Bacteroidetes”(0.9800), c: “Bacteroidia”(0.9212), | 4551 |
| | | | | | o: “Bacteroidales”(0.8659), f: “Prevotellaceae”(0.5455), g: Prevotella(0.3437), | |
| | | | | | s: Prevotella_{—}shahii(0.0894) | |
| Ascusb_233A | 202203087 | Ascusb_233 | 100 | 0.77468 | d: Bacteria(1.0000), p: Firmicutes(0.9200), c: Clostridia(0.7544), | 4552 |
| | | | | | o: Clostridiales(0.6111), f: Ruminococcaceae(0.2689), g: Clostridium_IV(0.1075), | |
| | | | | | s: Clostridium_{—}leptum(0.0430) | |
| Ascusb_5387A | 202203087 | Ascusb_5387 | 98.2 | 0.83068 | d: Bacteria(1.0000), p: Firmicutes(0.9300), c: Clostridia(0.6789), | 4553 |
| | | | | | o: Clostridiales(0.4956), f: Ruminococcaceae(0.2329), g: Clostridium_IV(0.1002), | |
| | | | | | s: Clostridium_{—}leptum(0.0421) | |
| Ascusb_211A | 202203087 | Ascusb_211 | 97.3 | 0.58809 | d: Bacteria(1.0000), p: “Bacteroidetes”(1.0000), c: “Bacteroidia”(1.0000), | 4554 |
| | | | | | o: “Bacteroidales”(1.0000), f: “Prevotellaceae”(0.9800), g: Prevotella(0.9604), | |
| | | | | | s: Prevotella_{—}ruminicola(0.7395) | |
| Ascusb_4058B | 202203087 | Ascusb_4058 | 99.1 | 0.62023 | d: Bacteria(1.0000), p: “Bacteroidetes”(1.0000), c: Cytophagia(0.1800), | 4555 |
| | | | | | o: Cytophagales(0.0324), f: Flammeovirgaceae(0.0045), g: Sediminitomix(0.0006), | |
| | | | | | s: Sediminitomix_{—}flava(0.0001) | |
| Ascusb_724A | 202203087 | Ascusb_724 | 98.7 | 0.60624 | d: Bacteria(1.0000), p: “Bacteroidetes”(0.9900), c: “Bacteroidia”(0.9702), | 4556 |
| | | | | | o: “Bacteroidales”(0.9508), f: “Prevotellaceae”(0.5705), g: Prevotella(0.3081), | |
| | | | | | s: Prevotella_{—}brevis(0.1386) | |
| Ascusb_2027A | 202203087 | Ascusb_2027 | 98.2 | 0.62292 | d: Bacteria(1.0000), p: “Bacteroidetes”(0.9900), c: “Bacteroidia”(0.9405), | 4557 |
| | | | | | o: “Bacteroidales”(0.8935), f: “Prevotellaceae”(0.5182), g: Prevotella(0.2487), | |
| | | | | | s: Prevotella_{—}brevis(0.1020) | |
| Ascusb_2886B | 202203087 | Ascusb_2886 | 97.3 | 0.46944 | d: Bacteria(1.0000), p: “Bacteroidetes”(0.9800), c: “Bacteroidia”(0.9408), | 4558 |
| | | | | | o: “Bacteroidales”(0.9032), f: “Prevotellaceae”(0.5690), g: Prevotella(0.3300), | |
| | | | | | s: Prevotella_{—}brevis(0.1518) | |
| Ascusb_2684A | 202203087 | Ascusb_2684 | 98.2 | 0.59759 | d: Bacteria(1.0000), p: Firmicutes(0.7300), c: Clostridia(0.5110), | 4559 |
| | | | | | o: Clostridiales(0.3577), f: Lachnospiraceae(0.1574), g: Lachnospiracea_{—}incertae_{—}sedis(0.0456), | |
| | | | | | s: Eubacterium_{—}xylanophilum(0.0119) | |
| Ascusb_12328A | 202203087 | Ascusb_12328 | 98.2 | 0.70588 | d: Bacteria(1.0000), p: Firmicutes(0.6800), c: Clostridia(0.4284), | 4560 |
| | | | | | o: Clostridiales(0.2699), f: Lachnospiraceae(0.0999), g: Lachnospiracea_{—}incertae_{—}sedis(0.0250), | |
| | | | | | s: Eubacterium_{—}xylanophilum(0.0057) | |
| Ascusb_10412A | 202203087 | Ascusb_10412 | 97.8 | 0.65892 | d: Bacteria(1.0000), p: Firmicutes(0.8300), c: Clostridia(0.6557), | 4561 |
| | | | | | o: Clostridiales(0.5180), f: Lachnospiraceae(0.2694), g: Lachnospiracea_{—}incertae_{—}sedis(0.0862), | |
| | | | | | s: Eubacterium_{—}xylanophilum(0.0250) | |
| Ascusb_7360B | 202203087 | Ascusb_7360 | 97.3 | 0.46247 | d: Bacteria(1.0000), p: Firmicutes(0.7300), c: Clostridia(0.4964), | 4562 |
| | | | | | o: Clostridiales(0.3376), f: Lachnospiraceae(0.1384), g: Lachnospiracea_{—}incertae_{—}sedis(0.0388), | |
| | | | | | s: Eubacterium_{—}xylanophilum(0.0085) | |
| Ascusb_168B | 202203087 | Ascusb_168 | 97.8 | 0.54575 | d: Bacteria(1.0000), p: “Bacteroidetes”(1.0000), c: “Bacteroidia”(0.9800), | 4563 |
| | | | | | o: “Bacteroidales”(0.9604), f: “Prevotellaceae”(0.3842), g: Prevotella(0.1383), | |
| | | | | | s: Prevotella_{—}brevis(0.0401) | |
| Ascusb_4736A | 202203087 | Ascusb_4736 | 99.1 | 0.57685 | d: Bacteria(1.0000), p: “Bacteroidetes”(0.9700), c: “Bacteroidia”(0.9215), | 4564 |
| | | | | | o: “Bacteroidales”(0.8754), f: Bacteroidaceae(0.4465), g: Bacteroides(0.2277), | |
| | | | | | s: Bacteroides_{—}coprophilus(0.0455) | |
| Ascusb_1985B | 202203087 | Ascusb_1985 | 99.1 | 0.57661 | d: Bacteria(1.0000), p: “Bacteroidetes”(0.9900), c: “Bacteroidia”(0.8910), | 4565 |
| | | | | | o: “Bacteroidales”(0.8019), f: “Prevotellaceae”(05212), g: Prevotella(0.3388), | |
| | | | | | s: Prevotella_{—}bryantii(0.0881) | |
| Ascusb_14185A | 202203087 | Ascusb_14185 | 98.7 | 0.54439 | d: Bacteria(1.0000), p: “Bacteroidetes”(0.9800), c: “Bacteroidia”(0.9114), | 4566 |
| | | | | | o: “Bacteroidales”(0.8476), f: “Prevotellaceae”(0.5679), g: Prevotella(0.3805), | |
| | | | | | s: Prevotella_{—}oryzae(0.0723) | |
| Ascusb_3092A | 202203087 | Ascusb_3092 | 97.8 | 0.52321 | d: Bacteria(1.0000), p: “Bacteroidetes”(0.9400), c: “Bacteroidia”(0.7802), | 4567 |
| | | | | | o: “Bacteroidales”(0.6476), f: “Prevotellaceae”(0.3756), g: Prevotella(0.2178), | |
| | | | | | s: Prevotella_{—}bryantii(0.0349) | |
| Ascusb_4173A | 202203087 | Ascusb_4173 | 97.3 | 0.57751 | d: Bacteria(1.0000), p: “Bacteroidetes”(0.9600), c: “Bacteroidia”(0.8352), | 4568 |
| | | | | | o: “Bacteroidales”(0.7266), f: “Prevotellaceae”(04505), g: Prevotella(0.2793), | |
| | | | | | s: Prevotella_{—}bryantii(0.0503) | |
| Ascusb_115A | 202203087 | Ascusb_115 | 99.6 | 0.68438 | d: Bacteria(1.0000), p: “Bacteroidetes”(1.0000), c: “Bacteroidia”(1.0000), | 4569 |
| | | | | | o: “Bacteroidales”(1.0000), f: “Prevotellaceae”(0.9800), g: Prevotella(0.9604), | |
| | | | | | s: Prevotella_{—}ruminicola(0.8932) | |
| Ascusb_6373A | 202203087 | Ascusb_6373 | 99.6 | 0.48326 | d: Bacteria(1.0000), p: “Tenericutes”(0.6400), c: Mollicutes(04096), | 4570 |
| | | | | | o: Entomoplasmatales(0.1720), f: Spiroplasmataceae(0.0705), g: Spiroplasma(0.0289), | |
| | | | | | s: Spiroplasma_{—}taiwanense(0.0049) | |
| Ascusb_17947B | 202203087 | Ascusb_17947 | 99.6 | 0.5943 | d: Bacteria(1.0000), p: “Bacteroidetes”(1.0000), c: “Bacteroidia”(0.9900), | 4571 |
| | | | | | o: “Bacteroidales”(0.9801), f: “Prevotellaceae”(0.9703), g: Prevotella(0.9606), | |
| | | | | | s: Prevotella_{—}copri(0.3938) | |
| Ascusb_2831A | 202203087 | Ascusb_2831 | 97.3 | 0.54039 | d: Bacteria(1.0000), p: Firmicutes(0.8400), c: Clostridia(0.6804), | 4572 |
| | | | | | o: Clostridiales(0.5511), f: Christensenellaceae(0.2370), g: Christensenella(0.1019), | |
| | | | | | s: Christensenella_{—}minuta(0.0438) | |
| Ascusb_1139B | 202203087 | Ascusb_1139 | 98.2 | 0.86905 | d: Bacteria(1.0000), p: Candidatus_Saccharibacteria(0.8400), | 4573 |
| | | | | | g: Saccharibacteria_{—}genera_{—}incertae_{—}sedis(0.7056) | |
| Ascusb_10375A | 202203087 | Ascusb_10375 | 98.7 | 0.51924 | d: Bacteria(1.0000), p: “Bacteroidetes”(0.9800), c: “Bacteroidia”(0.9310), | 4574 |
| | | | | | o: “Bacteroidales”(0.8844), f: “Prevotellaceae”(0.5660), g: Prevotella(0.3623), | |
| | | | | | s: Prevotella_{—}brevis(0.1703) | |
| Ascusb_15111A | 202203087 | Ascusb_15111 | 99.1 | 0.59032 | d: Bacteria(1.0000), p: “Bacteroidetes”(0.9900), c: “Bacteroidia”(0.9504), | 4575 |
| | | | | | o: “Bacteroidales”(0.9124), f: “Prevotellaceae”(0.5839), g: Prevotella(0.3737), | |
| | | | | | s: Prevotellabrevis(0.1794) | |
| Ascusb_10976A | 202203087 | Ascusb_10976 | 99.1 | 0.4498 | d: Bacteria(1.0000), p: “Bacteroidetes”(0.9900), c: “Bacteroidia”(0.9504), | 4576 |
| | | | | | o: “Bacteroidales”(0.9124), f: “Prevotellaceae”(0.5474), g: Prevotella(0.3285), | |
| | | | | | s: Prevotella_{—}brevis(0.1577) | |
| Ascusb_8024B | 202203087 | Ascusb_8024 | 98.7 | 0.48325 | d: Bacteria(1.0000), p: “Bacteroidetes”(0.9900), c: Flavobacteriia(0.6039), | 4577 |
| | | | | | o: “Flavobacteriales”(0.3684), f: Cryomorphaceae(0.0847), g: Wandonia(0.0195), | |
| | | | | | s: Wandonia_{—}haliotis(0.0045) | |
| Ascusb_120B | 202203087 | Ascusb_120 | 100 | 0.50223 | d: Bacteria(1.0000), p: “Bacteroidetes”(1.0000), c: “Bacteroidia”(1.0000), | 4578 |
| | | | | | o: “Bacteroidales”(1.0000), f: “Prevotellaceae”(0.9500), g: Prevotella(0.9025), | |
| | | | | | s: Prevotella_{—}brevis(0.6408) | |
| Ascusb_1187A | 202203087 | Ascusb_1187 | 98.2 | 0.50709 | d: Bacteria(1.0000), p: Firmicutes(0.6600), c: Clostridia(0.3564), | 4579 |
| | | | | | o: Clostridiales(0.1889), f: Lachnospiraceae(0.0510), g: Lachnospiracea_{—}incertae_{—}sedis(0.0087), | |
| | | | | | s: Eubacterium_{—}hallii(0.0013) | |
| Ascusb_10663A | 202203087 | Ascusb_10663 | 99.1 | 0.73098 | d: Bacteria(1.0000), p: “Bacteroidetes”(1.0000), c: “Bacteroidia”(0.9900), | 4580 |
| | | | | | o: “Bacteroidales”(0.9801), f: “Prevotellaceae”(08625), g: Prevotella(0.7504), | |
| | | | | | s: Prevotella_{—}brevis(0.3827) | |
| Ascusb_1989A | 202203087 | Ascusb_1989 | 99.6 | 0.55476 | d: Bacteria(1.0000), p: “Bacteroidetes”(1.0000), c: “Bacteroidia”(1.0000), | 4581 |
| | | | | | o: “Bacteroidales”(1.0000), f: “Prevotellaceae”(0.7700), g: Prevotella(0.5929), | |
| | | | | | s: Prevotella_{—}brevis(0.2668) | |
| Ascusb_132B | 202203087 | Ascusb_132 | 99.6 | 0.57452 | d: Bacteria(1.0000), p: “Bacteroidetes”(1.0000), c: “Bacteroidia”(0.9800), | 4582 |
| | | | | | o: “Bacteroidales”(0.9604), f: “Prevotellaceae”(0.7491), g: Prevotella(0.5768), | |
| | | | | | s: Prevotella_{—}brevis(0.2769) | |
| Ascusb_3718B | 202203087 | Ascusb_3718 | 98.7 | 0.58217 | d: Bacteria(1.0000), p: “Bacteroidetes”(1.0000), c: “Bacteroidia”(1.0000), | 4583 |
| | | | | | o: “Bacteroidales”(1.0000), f: “Prevotellaceae”(0.7800), g: Prevotella(0.6084), | |
| | | | | | s: Prevotella_{—}brevis(0.3590) | |
| Ascusb_1203A | 202203087 | Ascusb_1203 | 98.7 | 0.56762 | d: Bacteria(1.0000), p: Firmicutes(0.1900), c: Clostridia(0.0323), | 4584 |
| | | | | | o: Clostridiales(0.0055), f: Lachnospiraceae(0.0009), g: Cellulosilyticum(0.0001), | |
| | | | | | s: Cellulosilyticum_{—}ruminicola(0.0000) | |
| Ascusb_112A | 202203087 | Ascusb_112 | 99.6 | 0.5635 | d: Bacteria(1.0000), p: “Synergistetes”(0.1300), c: Synergistia(0.0169), | 4585 |
| | | | | | o: Synergistales(0.0022), f: Synergistaceae(0.0003), g: Aminiphilus(0.0000), | |
| | | | | | s: Aminiphilus_{—}circumscriptus(0.0000) | |
| Ascusb_2434A | 202203087 | Ascusb_2434 | 99.6 | 0.55815 | d: Bacteria(1.0000), p: “Bacteroidetes”(0.9900), c: “Bacteroidia”(0.9801), | 4586 |
| | | | | | o: “Bacteroidales”(0.9703), f: “Prevotellaceae”(0.7859), g: Prevotella(0.6366), | |
| | | | | | s: Prevotella_{—}ruminicola(0.3247) | |
| Ascusb_3663A | 202203087 | Ascusb_3663 | 99.6 | 0.63822 | d: Bacteria(1.0000), p: “Bacteroidetes”(1.0000), c: “Bacteroidia”(1.0000), | 4587 |
| | | | | | o: “Bacteroidales”(1.0000), f: “Prevotellaceae”(0.8600), g: Prevotella(0.7396), | |
| | | | | | s: Prevotella_{—}ruminicola(0.5251) | |
| Ascusb_3879B | 202203087 | Ascusb_3879 | 99.6 | 0.58991 | d: Bacteria(1.0000), p: “Bacteroidetes”(0.9800), c: Cytophagia(0.2842), | 4588 |
| | | | | | o: Cytophagales(0.0824), f: Flammeovirgaceae(0.0206), g: Aureibacter(0.0049), | |
| | | | | | s: Aureibacter_{—}tunicatorum(0.0012) | |
| Ascusb_10845A | 202203087 | Ascusb_10845 | 99.1 | 0.8353 | d: Bacteria(1.0000), p: Firmicutes(0.8000), c: Clostridia(0.6240), | 4589 |
| | | | | | o: Clostridiales(0.4867), f: Lachnospiraceae(0.2044), g: Lachnospiracea_{—}incertae_{—}sedis(0.0552), | |
| | | | | | s: Eubacterium_{—}xylanophilum(0.0149) | |
| Ascusb_15117A | 202203087 | Ascusb_15117 | 99.6 | 0.57647 | d: Bacteria(1.0000), p: “Bacteroidetes”(1.0000), c: “Bacteroidia”(0.9700), | 4590 |
| | | | | | o: “Bacteroidales”(0.9409), f: “Prevotellaceae”(0.5928), g: Prevotella(0.3734), | |
| | | | | | s: Prevotella_{—}brevis(0.1942) | |
| Ascusb_927A | 202203087 | Ascusb_927 | 98.2 | 0.51524 | d: Bacteria(1.0000), p: “Bacteroidetes”(1.0000), c: “Bacteroidia”(1.0000), | 4591 |
| | | | | | o: “Bacteroidales”(1.0000), f: “Prevotellaceae”(0.6400), g: Prevotella(0.3904), | |
| | | | | | s: Prevotella_{—}brevis(0.1757) | |
| Ascusb_2143A | 202203087 | Ascusb_2143 | 99.6 | 0.46995 | d: Bacteria(1.0000), p: “Bacteroidetes”(1.0000), c: “Bacteroidia”(1.0000), | 4592 |
| | | | | | o: “Bacteroidales”(1.0000), f: “Prevotellaceae”(0.9900), g: Prevotella(0.9801), | |
| | | | | | s: Prevotella_{—}brevis(0.9703) | |
| Ascusb_9020A | 202203087 | Ascusb_9020 | 97.8 | 0.4462 | d: Bacteria(1.0000), p: “Bacteroidetes”(0.9600), c: “Bacteroidia”(0.8928), | 4593 |
| | | | | | o: “Bacteroidales”(0.8303), f: “Prevotellaceae”(0.3404), g: Prevotella(0.1260), | |
| | | | | | s: Prevotella_{—}albensis(0.0277) | |
| Ascusb_3047A | 202203087 | Ascusb_3047 | 98.2 | 0.50948 | d: Bacteria(1.0000), p: “Bacteroidetes”(1.0000), c: “Bacteroidia”(0.9600), | 4594 |
| | | | | | o: “Bacteroidales”(0.9216), f: Bacteroidaceae(0.8755), g: Bacteroides(0.8317), | |
| | | | | | s: Bacteroides_{—}coprocola(0.3660) | |
| Ascusb_1784A | 202203087 | Ascusb_1784 | 98.2 | 0.60865 | d: Bacteria(1.0000), p: “Bacteroidetes”(1.0000), c: “Bacteroidia”(0.9800), | 4595 |
| | | | | | o: “Bacteroidales”(0.9604), f: Bacteroidaceae(0.9316), g: Bacteroides(0.9036), | |
| | | | | | s: Bacteroides_{—}coprocola(0.3976) | |
| Ascusb_239B | 202203087 | Ascusb_239 | 98.7 | 0.51597 | d: Bacteria(1.0000), p: Firmicutes(0.9200), c: Clostridia(0.8372), | 4596 |
| | | | | | o: Clostridiales(0.7619), f: Lachnospiraceae(0.6171), g: Lachnospiracea_{—}incertae_{—}sedis(0.1358), | |
| | | | | | s: Eubacterium_{—}ruminantium(0.0231) | |
| Ascusb_1726A | 202203087 | Ascusb_1726 | 100 | 0.67539 | d: Bacteria(1.0000), p: Firmicutes(0.6500), c: Bacilli(0.3705), | 4597 |
| | | | | | o: Lactobacillobacillaceae(0.0448), g: Lactobacillus(0.0125), | |
| | | | | | s: Lactobacillus_{—}saniviri(0.0009) | |
| Ascusb_5956A | 202203087 | Ascusb_5956 | 98.7 | 0.46289 | d: Bacteria(1.0000), p: Firmicutes(0.6500), c: Bacilli(0.3380), | 4598 |
| | | | | | o: Bacillales(0.0710), f: Paenibacillaceae_1(0.0092), g: Paenibacillus(0.0012), | |
| | | | | | s: Paenibacillus_{—}taiwanensis(0.0001) | |
| Ascusb_3859A | 202203087 | Ascusb_3859 | 99.1 | 0.67286 | d: Bacteria(1.0000), p: Firmicutes(0.4700), c: Clostridia(0.1927), | 4599 |
| | | | | | o: Clostridiales(0.0790), f: Peptococcaceae_1(0.0095), g: Peptococcus(0.0010), | |
| | | | | | s: Peptococcus_{—}niger(0.0001) | |
| Ascusb_12803A | 202203087 | Ascusb_12803 | 100 | 0.58052 | d: Bacteria(1.0000), p: “Bacteroidetes”(1.0000), c: “Bacteroidia”(1.0000), | 4600 |
| | | | | | o: “Bacteroidales”(1.0000), f: “Prevotellaceae”(0.8200), g: Prevotella(0.6478), | |
| | | | | | s: Prevotella_{—}ruminicola(0.4599) | |
| Ascusb_11494A | 202203087 | Ascusb_11494 | 99.6 | 0.47549 | d: Bacteria(1.0000), p: “Bacteroidetes”(1.0000), c: “Bacteroidia”(1.0000), | 4601 |
| | | | | | o: “Bacteroidales”(1.0000), f: “Prevotellaceae”(0.8000), g: Prevotella(0.6240), | |
| | | | | | s: Prevotella_{—}ruminicola(0.4368) | |
| Ascusb_2590B | 202203086 | Ascusb_2590 | 97.8 | 0.60511 | d: Bacteria(1.0000), p: “Bacteroidetes”(1.0000), c: “Bacteroidia”(0.9900), | 4602 |
| | | | | | o: “Bacteroidales”(0.9801), f: Bacteroidaceae(0.9703), g: Bacteroides(0.9606), | |
| | | | | | s: Bacteroides_{—}coprocola(0.6244) | |
| Ascusb_2191A | 202203086 | Ascusb_2191 | 97.8 | 0.61282 | d: Bacteria(1.0000), p: Firmicutes(0.7500), c: Clostridia(0.4875), | 4603 |
| | | | | | o: Clostridiales(0.3120), f: Lachnospiraceae(0.1154), g: Clostridium_XIVa(0.0185), | |
| | | | | | s: Clostridium_{—}glycyrrhizinilyticum(0.0018) | |
| Ascusb_3089A | 202203086 | Ascusb_3089 | 98.2 | 0.54157 | d: Bacteria(1.0000), p: Firmicutes(0.7700), c: Clostridia(0.5005), | 4604 |
| | | | | | o: Clostridiales(0.3253), f: Christensenellaceae(0.0260), g: Christensenella(0.0021), | |
| | | | | | s: Christensenella_{—}minuta(0.0002) | |
| Ascusb_9216A | 202203086 | Ascusb_9216 | 98.2 | 0.45988 | d: Bacteria(1.0000), p: “Bacteroidetes”(0.9900), c: “Bacteroidia”(0.9405), | 4605 |
| | | | | | o: “Bacteroidales”(0.8935), f: Bacteroidaceae(0.5272), g: Bacteroides(0.3110), | |
| | | | | | s: Bacteroides_{—}coprocola(0.0622) | |
| Ascusb_3606A | 202203086 | Ascusb_3606 | 98.7 | 0.66354 | d: Bacteria(1.0000), p: “Bacteroidetes”(0.9900), c: “Bacteroidia”(0.3762), | 4606 |
| | | | | | o: “Bacteroidales”(0.1430), f: “Rikenellaceae”(0.0315), g: Alistipes(0.0063), | |
| | | | | | s: Alistipes_{—}putredinis(0.0008) | |
| Ascusb_1588A | 202203086 | Ascusb_1588 | 97.3 | 0.65608 | d: Bacteria(1.0000), p: “Bacteroidetes”(0.9700), c: Flavobacteriia(0.4947), | 4607 |
| | | | | | o: “Flavobacteriales”(0.2523), f: Cryomorphaceae(0.0656), g: Fluviicola(0.0112), | |
| | | | | | s: Fluviicola_{—}taffensis(0.0019) | |
| Ascusb_239A | 202203086 | Ascusb_239 | 99.1 | 0.51597 | d: Bacteria(1.0000), p: Firmicutes(0.9200), c: Clostridia(0.8372), | 4608 |
| | | | | | o: Clostridiales(0.7619), f: Lachnospiraceae(0.6171), g: Lachnospiracea_{—}incertae_{—}sedis(0.1358), | |
| | | | | | s: Eubacterium_{—}ruminantium(0.0231) | |
| Ascusb_2485A | 202203086 | Ascusb_2485 | 99.6 | 0.5459 | d: Bacteria(1.0000), p: Candidatus_Saccharibacteria(0.9100), | 4609 |
| | | | | | g: Saccharibacteria_{—}genera_{—}incertae_{—}sedis(0.8281) | |
| Ascusb_5231A | 202203086 | Ascusb_5231 | 97.3 | 0.50582 | d: Bacteria(1.0000), p: Candidatus_Saccharibacteria(0.8600), | 4610 |
| | | | | | g: Saccharibacteria_{—}genera_{—}incertae_{—}sedis(0.7396) | |
| Ascusb_51A | 202203086 | Ascusb_51 | 97.8 | 0.90565 | d: Bacteria(1.0000), p: “Bacteroidetes”(1.0000), c: “Bacteroidia”(0.9900), | 4611 |
| | | | | | o: “Bacteroidales”(0.9801), f: “Prevotellaceae”(09017), g: Prevotella(0.8115), | |
| | | | | | s: Prevotella_{—}bryantii(0.3246) | |
| Ascusb_5315A | 202203086 | Ascusb_5315 | 99.6 | 0.60302 | d: Bacteria(1.0000), p: “Bacteroidetes”(1.0000), c: “Bacteroidia”(1.0000), | 4612 |
| | | | | | o: “Bacteroidales”(1.0000), f: “Prevotellaceae”(0.9700), g: Prevotella(0.9409), | |
| | | | | | s: Prevotella_{—}ruminicola(0.8468) | |
| Ascusb_295A | 202203086 | Ascusb_295 | 98.7 | 0.88875 | d: Bacteria(1.0000), p: SR1(1.0000), g: SR1_genera_incertae_sedis(1.0000) | 4613 |
| Ascusb_1760A | 202203086 | Ascusb_1760 | 98.2 | 0.72911 | d: Bacteria(1.0000), p: Firmicutes(0.8600), c: Clostridia(0.6450), | 4614 |
| | | | | | o: Clostridiales(0.4838), f: Ruminococcaceae(0.3386), g: Hydrogenoanaerobacterium(0.1930), | |
| | | | | | s: Hydrogenoanaerobacterium_{—}saccharovorans(0.1100) | |
| Ascusb_2890A | 202203086 | Ascusb_2890 | 98.2 | 0.47616 | d: Bacteria(1.0000), p: Firmicutes(0.8000), c: Clostridia(0.5520), | 4615 |
| | | | | | o: Clostridiales(0.3588), f: Ruminococcaceae(0.0789), g: Sporobacter(0.0047), | |
| | | | | | s: Sporobacter_{—}termitidis(0.0003) | |
| Ascusb_5168B | 202203086 | Ascusb_5168 | 97.3 | 0.50001 | d: Bacteria(1.0000), p: “Bacteroidetes”(1.0000), c: “Bacteroidia”(0.9900), | 4616 |
| | | | | | o: “Bacteroidales”(0.9801), f: “Prevotellaceae”(0.4606), g: Prevotella(0.1935), | |
| | | | | | s: Prevotella_{—}brevis(0.0600) | |
| Ascusb_6642B | 202203086 | Ascusb_6642 | 97.3 | 0.54668 | d: Bacteria(1.0000), p: “Bacteroidetes”(0.9700), c: “Bacteroidia”(0.9118), | 4617 |
| | | | | | o: “Bacteroidales”(0.8571), f: “Prevotellaceae”(0.3943), g: Prevotella(0.1459), | |
| | | | | | s: Prevotella_{—}brevis(0.0321) | |
| Ascusb_2987A | 202203086 | Ascusb_2987 | 99.1 | 0.48922 | d: Bacteria(1.0000), p: “Bacteroidetes”(0.7800), c: “Bacteroidia”(0.4524), | 4618 |
| | | | | | o: “Bacteroidales”(0.2624), f: “Porphyromonadaceae”(0.0997), g: Tannerella(0.0209), | |
| | | | | | s: Tannerella_{—}forsythia(0.0044) | |
| Ascusb_4119A | 202203086 | Ascusb_4119 | 98.2 | 0.61021 | d: Bacteria(1.0000), p: Firmicutes(0.9400), c: Clostridia(0.7802), | 4619 |
| | | | | | o: Clostridiales(0.5930), f: Ruminococcaceae(0.3321), g: Clostridium_III(0.1461), | |
| | | | | | s: Clostridium_{—}termitidis(0.0438) | |
| Ascusb_64A | 202203086 | Ascusb_64 | 99.6 | 0.89567 | d: Bacteria(1.0000), p: Firmicutes(0.9300), c: Clostridia(0.7998), | 4620 |
| | | | | | o: Clostridiales(0.6878), f: Ruminococcaceae(0.4471), g: Clostridium_IV(0.2146), | |
| | | | | | s: Clostridium_{—}leptum(0.0837) | |
| Ascusb_4286A | 202203086 | Ascusb_4286 | 99.6 | 0.47913 | d: Bacteria(1.0000), p: “Bacteroidetes”(0.9700), c: “Bacteroidia”(0.3880), | 4621 |
| | | | | | o: “Bacteroidales”(0.1552), f: “Porphyromonadaceae”(0.0357), g: Barnesiella(0.0046), | |
| | | | | | s: Barnesiella_{—}viscericola(0.0006) | |
| Ascusb_9898A | 202203086 | Ascusb_9898 | 99.6 | 0.61448 | d: Bacteria(1.0000), p: “Bacteroidetes”(0.9700), c: Flavobacteriia(0.3977), | 4622 |
| | | | | | o: “Flavobacteriales”(0.1631), f: Flavobacteriaceae(0.0669), g: Sinomicrobium(0.0060), | |
| | | | | | s: Sinomicrobium_{—}pectinilyticum(0.0005) | |
| Ascusb_430A | 202203086 | Ascusb_430 | 97.8 | 0.50084 | d: Bacteria(1.0000), p: “Bacteroidetes”(0.9500), c: “Bacteroidia”(0.5700), | 4623 |
| | | | | | o: “Bacteroidales”(0.3420), f: “Porphyromonadaceae”(0.1060), g: Barnesiella(0.0138), | |
| | | | | | s: Barnesiella_{—}viscericola(0.0018) | |
| Ascusb_254A | 202203086 | Ascusb_254 | 99.1 | 0.59255 | d: Bacteria(1.0000), p: Firmicutes(0.9000), c: Clostridia(0.8010), | 4624 |
| | | | | | o: Clostridiales(0.7129), f: Lachnospiraceae(0.6273), g: Clostridium_XIVa(0.3890), | |
| | | | | | s: Clostridium_{—}fimetarium(0.1789) | |
| Ascusb_9421A | 202203086 | Ascusb_9421 | 98.7 | 0.52514 | d: Bacteria(1.0000), p: “Bacteroidetes”(0.6500), c: Sphingobacteriia(0.2145), | 4625 |
| | | | | | o: “Sphingobacteriales”(0.0708), f: Chitinophagaceae(0.0234), g: Cnuella(0.0026), | |
| | | | | | s: Cnuella_{—}takakiae(0.0003) | |
| Ascusb_1618A | 202203086 | Ascusb_1618 | 100 | 0.45987 | d: Bacteria(1.0000), p: Firmicutes(0.9600), c: Clostridia(0.9120), | 4626 |
| | | | | | o: Clostridiales(0.8664), f: Lachnospiraceae(0.7191), g: Clostridium_XIVa(0.2805), | |
| | | | | | s: Clostridium_{—}glycyrrhizinilyticum(0.0337) | |
| Ascusb_20052A | 202203086 | Ascusb_20052 | 99.6 | 0.48834 | d: Bacteria(1.0000), p: “Bacteroidetes”(0.9900), c: “Bacteroidia”(0.9702), | 4627 |
| | | | | | o: “Bacteroidales”(0.9508), f: “Prevotellaceae”(0.9128), g: Prevotella(0.8763), | |
| | | | | | s: Prevotella_{—}brevis(0.5871) | |
| Ascusb_386A | 202203086 | Ascusb_386 | 100 | 0.60942 | d: Bacteria(1.0000), p: “Bacteroidetes”(0.9900), c: “Bacteroidia”(0.3564), | 4628 |
| | | | | | o: “Bacteroidales”(0.1283), f: “Rikenellaceae”(0.0205), g: Alistipes(0.0033), | |
| | | | | | s: Alistipes_{—}finegoldii(0.0003) | |
| Ascusb_1419A | 202203086 | Ascusb_1419 | 100 | 0.57852 | d: Bacteria(1.0000), p: “Bacteroidetes”(0.9900), c: “Bacteroidia”(0.3366), | 4629 |
| | | | | | o: “Bacteroidales”(0.1144), f: “Rikenellaceae”(0.0160), g: Alistipes(0.0021), | |
| | | | | | s: Alistipes_{—}finegoldii(0.0002) | |
| Ascusb_13271A | 202203086 | Ascusb_13271 | 97.3 | 0.83405 | d: Bacteria(1.0000), p: Firmicutes(0.8800), c: Clostridia(0.6864), | 4630 |
| | | | | | o: Clostridiales(0.5217), f: Lachnospiraceae(0.1930), g: Roseburia(0.0386), | |
| | | | | | s: Roseburia_{—}hominis(0.0050) | |
| Ascusb_12149A | 202203086 | Ascusb_12149 | 97.3 | 0.56358 | d: Bacteria(1.0000), p: Firmicutes(1.0000), c: Clostridia(1.0000), | 4631 |
| | | | | | o: Clostridiales(1.0000), f: Lachnospiraceae(0.9900), g: Lachnoanaerobaculum(0.5346), | |
| | | | | | s: Lachnoanaerobaculum_{—}orale(0.2352) | |
| Ascusb_2606A | 202203086 | Ascusb_2606 | 99.6 | 0.76747 | d: Bacteria(1.0000), p: “Spirochaetes”(0.9600), c: Spirochaetia(0.9216), | 4632 |
| | | | | | o: Spirochaetales(0.8847), f: Spirochaetaceae(0.8493), g: Treponema(0.7814), | |
| | | | | | s: Treponema_{—}denticola(0.2422) | |
| Ascusb_4791A | 202203086 | Ascusb_4791 | 99.1 | 0.48818 | d: Bacteria(1.0000), p: Firmicutes(0.5300), c: Clostridia(0.2332), | 4633 |
| | | | | | o: Clostridiales(0.1003), f: Ruminococcaceae(0.0321), g: Hydrogenoanaerobacterium(0.0087), | |
| | | | | | s: Hydrogenoanaerobacterium_{—}saccharovorans(0.0023) | |
| Ascusb_688A | 202203086 | Ascusb_688 | 100 | 0.66709 | d: Bacteria(1.0000), p: “Bacteroidetes”(1.0000), c: “Bacteroidia”(0.9800), | 4634 |
| | | | | | o: “Bacteroidales”(0.9604), f: “Prevotellaceae”(08932), g: Prevotella(0.8306), | |
| | | | | | s: Prevotella_{—}ruminicola(0.6479) | |
| Ascusb_19080A | 202203086 | Ascusb_19080 | 99.6 | 0.68292 | d: Bacteria(1.0000), p: “Bacteroidetes”(1.0000), c: “Bacteroidia”(1.0000), | 4635 |
| | | | | | o: “Bacteroidales”(1.0000), f: “Prevotellaceae”(0.9500), g: Prevotella(0.9025), | |
| | | | | | s: Prevotella_{—}brevis(0.7491) | |
| Ascusb_126A | 202203086 | Ascusb_126 | 98.7 | 0.92772 | d: Bacteria(1.0000), p: Firmicutes(0.7000), c: Clostridia(0.4760), | 4636 |
| | | | | | o: Clostridiales(0.3237), f: Ruminococcaceae(0.1521), g: Hydrogenoanaerobacterium(0.0289), | |
| | | | | | s: Hydrogenoanaerobacterium_{—}saccharovorans(0.0055) | |
| Ascusb_2792A | 202203086 | Ascusb_2792 | 97.8 | 0.66136 | d: Bacteria(1.0000), p: Firmicutes(0.8400), c: Erysipelotrichia(0.3024), | 4637 |
| | | | | | o: Erysipelotrichales(0.1089), f: Erysipelotrichaceae(0.0392), g: Turicibacter(0.0086), | |
| | | | | | s: Turicibacter_{—}sanguinis(0.0019) | |
| Ascusb_4492A | 202203086 | Ascusb_4492 | 100 | 0.48777 | d: Bacteria(1.0000), p: “Tenericutes”(1.0000), c: Mollicutes(1.0000), | 4638 |
| | | | | | o: Anaeroplasmatales(1.0000), f: Anaeroplasmataceae(1.0000), g: Anaeroplasma(1.0000), | |
| | | | | | s: Anaeroplasma_{—}bactoclasticum(0.7400) | |
| Ascusb_1961A | 202203086 | Ascusb_1961 | 98.7 | 0.51577 | d: Bacteria(1.0000), p: Firmicutes(0.8800), c: Clostridia(0.7480), | 4639 |
| | | | | | o: Clostridiales(0.6358), f: Ruminococcaceae(0.5150), g: Ruminococcus(0.3708), | |
| | | | | | s: Ruminococcus_{—}flavefaciens(0.2225) | |
| Ascusb_453A | 202203086 | Ascusb_453 | 99.6 | 0.43933 | d: Bacteria(1.0000), p: “Bacteroidetes”(0.9900), c: “Bacteroidia”(0.8514), | 4640 |
| | | | | | o: “Bacteroidales”(0.7322), f: “Prevotellaceae”(0.2123), g: Prevotella(0.0595), | |
| | | | | | s: Prevotella_{—}albensis(0.0125) | |
| Ascusb_1794A | 202203086 | Ascusb_1794 | 98.2 | 0.80012 | d: Bacteria(1.0000), p: “Bacteroidetes”(0.8600), c: Sphingobacteriia(0.2752), | 4641 |
| | | | | | o: “Sphingobacteriales”(0.0881), f: Chitinophagaceae(0.0247), g: Chitinophaga(0.0064), | |
| | | | | | s: Chitinophaga_{—}qingshengii(0.0015) | |
| Ascusb_489A | 202203086 | Ascusb_489 | 100 | 0.45079 | d: Bacteria(1.0000), p: “Bacteroidetes”(1.0000), c: “Bacteroidia”(0.2400), | 4642 |
| | | | | | o: “Bacteroidales”(0.0576), f: “Rikenellaceae”(0.0063), g: Alistipes(0.0007), | |
| | | | | | s: Alistipes_{—}finegoldii(0.0001) | |
| Ascusb_2590A | 202203086 | Ascusb_2590 | 99.6 | 0.60511 | d: Bacteria(1.0000), p: “Bacteroidetes”(1.0000), c: “Bacteroidia”(0.9900), | 4643 |
| | | | | | o: “Bacteroidales”(0.9801), f: Bacteroidaceae(0.9703), g: Bacteroides(0.9606), | |
| | | | | | s: Bacteroides_{—}coprocola(0.6244) | |
| Ascusb_1340A | 202203086 | Ascusb_1340 | 98.2 | 0.54716 | d: Bacteria(1.0000), p: “Tenericutes”(0.5200), c: Mollicutes(0.2704), | 4644 |
| | | | | | o: Mycoplasmatales(0.1082), f: Mycoplasmataceae(0.0433), g: Mycoplasma(0.0173), | |
| | | | | | s: Mycoplasma_{—}penetrans(0.0033) | |
| Ascusb_4420A | 202203086 | Ascusb_4420 | 99.1 | 0.46209 | d: Bacteria(1.0000), p: Firmicutes(0.9300), c: Clostridia(0.7719), | 4645 |
| | | | | | o: Clostridiales(0.6407), f: Ruminococcaceae(0.1474), g: Clostridium_IV(0.0251), | |
| | | | | | s: Clostridium_{—}leptum(0.0033) | |
| Ascusb_3590A | 202203086 | Ascusb_3590 | 99.6 | 0.53769 | d: Bacteria(1.0000), p: “Bacteroidetes”(1.0000), c: “Bacteroidia”(1.0000), | 4646 |
| | | | | | o: “Bacteroidales”(1.0000), f: “Prevotellaceae”(08100), g: Prevotella(0.6480), | |
| | | | | | s: Prevotella_{—}brevis(0.3823) | |
| Ascusb_4971A | 202203086 | Ascusb_4971 | 97.8 | 0.54149 | d: Bacteria(1.0000), p: Firmicutes(1.0000), c: Clostridia(1.0000), | 4647 |
| | | | | | o: Clostridiales(1.0000), f: Lachnospiraceae(0.8300), g: Clostridium_XIVa(0.4897), | |
| | | | | | s: Clostridium_{—}glycyrrhizinilyticum(0.2400) | |
| Ascusb_325A | 202203086 | Ascusb_325 | 100 | 0.81619 | d: Bacteria(1.0000), p: Candidatus_Saccharibacteria(0.9200), | 4648 |
| | | | | | g: Saccharibacteria_{—}genera_{—}incertae_{—}sedis(0.8464) | |
| Ascusb_3264A | 202203086 | Ascusb_3264 | 99.6 | 0.63261 | d: Bacteria(1.0000), p: “Bacteroidetes”(1.0000), c: “Bacteroidia”(1.0000), | 4649 |
| | | | | | o: “Bacteroidales”(1.0000), f: Bacteroidaceae(0.9900), g: Bacteroides(0.9801), | |
| | | | | | s: Bacteroides_{—}uniformis(0.4900) | |
| Ascusb_6655A | 202203086 | Ascusb_6655 | 99.6 | 0.6082 | d: Bacteria(1.0000), p: Cyanobacteria/Chloroplast(0.2600), c: Chloroplast(0.0416), | 4650 |
| | | | | | f: Chloroplast(0.0067), g: Streptophyta(0.0010) | |
| Ascusb_725A | 202203086 | Ascusb_725 | 99.6 | 0.50013 | d: Bacteria(1.0000), p: “Bacteroidetes”(1.0000), c: “Bacteroidia”(1.0000), | 4651 |
| | | | | | o: “Bacteroidales”(1.0000), f: “Prevotellaceae”(0.9400), g: Prevotella(0.8836), | |
| | | | | | s: Prevotella_{—}brevis(0.7952) | |
| Ascusb_1715A | 202203086 | Ascusb_1715 | 99.1 | 0.53111 | d: Bacteria(1.0000), p: “Bacteroidetes”(1.0000), c: “Bacteroidia”(1.0000), | 4652 |
| | | | | | o: “Bacteroidales”(1.0000), f: “Prevotellaceae”(0.9600), g: Prevotella(0.9216), | |
| | | | | | s: Prevotella_{—}brevis(0.8663) | |
| Ascusb_1889A | 202203086 | Ascusb_1889 | 97.3 | 0.50423 | d: Bacteria(1.0000), p: “Bacteroidetes”(1.0000), c: “Bacteroidia”(1.0000), | 4653 |
| | | | | | o: “Bacteroidales”(1.0000), f: “Prevotellaceae”(09900), g: Prevotella(0.9801), | |
| | | | | | s: Prevotella_{—}brevis(0.9605) | |
| Ascusb_5156A | 202203086 | Ascusb_5156 | 97.3 | 0.52634 | d: Bacteria(1.0000), p: “Bacteroidetes”(0.8500), c: “Bacteroidia”(0.3060), | 4654 |
| | | | | | o: “Bacteroidales”(0.1102), f: “Rikenellaceae”(0.0154), g: Anaerocella(0.0015), | |
| | | | | | s: Anaerocella_{—}delicata(0.0002) | |
| Ascusb_383A | 202203086 | Ascusb_383 | 99.1 | 0.46569 | d: Bacteria(1.0000), p: “Bacteroidetes”(1.0000), c: “Bacteroidia”(1.0000), | 4655 |
| | | | | | o: “Bacteroidales”(1.0000), f: “Prevotellaceae”(0.9900), g: Prevotella(0.9801), | |
| | | | | | s: Prevotella_{—}brevis(0.9703) | |
| Ascusb_5168A | 202203086 | Ascusb_5168 | 99.6 | 0.50001 | d: Bacteria(1.0000), p: “Bacteroidetes”(1.0000), c: “Bacteroidia”(0.9900), | 4656 |
| | | | | | o: “Bacteroidales”(0.9801), f: “Prevotellaceae”(0.4606), g: Prevotella(0.1935), | |
| | | | | | s: Prevotella_{—}brevis(0.0600) | |
| Ascusb_6642A | 202203086 | Ascusb_6642 | 98.7 | 0.54668 | d: Bacteria(1.0000), p: “Bacteroidetes”(0.9700), c: “Bacteroidia”(0.9118), | 4657 |
| | | | | | o: “Bacteroidales”(0.8571), f: “Prevotellaceae”(0.3943), g: Prevotella(0.1459), | |
| | | | | | s: Prevotella_{—}brevis(0.0321) | |
| Ascusb_4355A | 202203086 | Ascusb_4355 | 98.7 | 0.59375 | d: Bacteria(1.0000), p: “Bacteroidetes”(0.9700), c: “Bacteroidia”(0.9312), | 4658 |
| | | | | | o: “Bacteroidales”(0.8940), f: “Prevotellaceae”(0.3844), g: Prevotella(0.1461), | |
| | | | | | s: Prevotella_{—}brevis(0.0394) | |
| Ascusb_1305A | 202203086 | Ascusb_1305 | 98.2 | 0.51127 | d: Bacteria(1.0000), p: Firmicutes(0.9400), c: Clostridia(0.8836), | 4659 |
| | | | | | o: Clostridiales(0.8306), f: Lachnospiraceae(0.7060), g: Lachnospiracea_{—}incertae_{—}sedis(0.2542), | |
| | | | | | s: Eubacterium_{—}eligens(0.0712) | |
| Ascusb_589A | 202203086 | Ascusb_589 | 98.2 | 0.51438 | d: Bacteria(1.0000), p: Firmicutes(0.9100), c: Clostridia(0.8281), | 4660 |
| | | | | | o: Clostridiales(0.7536), f: Lachnospiraceae(0.6255), g: Clostridium_XIVa(0.3190), | |
| | | | | | s: Clostridium_{—}bolteae(0.0861) | |
| Ascusb_19362A | 202203086 | Ascusb_19362 | 97.3 | 0.62856 | d: Bacteria(1.0000), p: Firmicutes(0.9700), c: Clostridia(0.9409), | 4661 |
| | | | | | o: Clostridiales(0.9127), f: Lachnospiraceae(0.8123), g: Lachnospiracea_{—}incertae_{—}sedis(0.2762), | |
| | | | | | s: Eubacterium_{—}eligens(0.0801) | |
| Ascusb_813A | 202203086 | Ascusb_813 | 97.3 | 0.71124 | d: Bacteria(1.0000), p: “Fibrobacteres”(1.0000), c: “Fibrobacteria”(1.0000), | 4662 |
| | | | | | o: “Fibrobacterales”(1.0000), f: “Fibrobacteraceae”(1.0000), g: Fibrobacter(1.0000), | |
| | | | | | s: Fibrobacter_{—}succinogenes_subsp._succinogenes(0.9700) | |
| Ascusb_1259A | 202203086 | Ascusb_1259 | 99.1 | 0.77258 | d: Bacteria(1.0000), p: Firmicutes(0.7100), c: Clostridia(0.4757), | 4663 |
| | | | | | o: Clostridiales(0.3187), f: Lachnospiraceae(0.1211), g: Lachnospiracea_{—}incertae_{—}sedis(0.0351), | |
| | | | | | s: Eubacterium_{—}xylanophilum(0.0084) | |
| Ascusb_6094A | 202203086 | Ascusb_6094 | 97.3 | 0.54382 | d: Bacteria(1.0000), p: “Bacteroidetes”(1.0000), c: “Bacteroidia”(1.0000), | 4664 |
| | | | | | o: “Bacteroidales”(1.0000), f: “Prevotellaceae”(0.8400), g: Prevotella(0.7056), | |
| | | | | | s: Prevotella_{—}brevis(0.3528) | |
| Ascusb_1139A | 202203086 | Ascusb_1139 | 99.6 | 0.86905 | d: Bacteria(1.0000), p: Candidatus_Saccharibacteria(0.8400), | 4665 |
| | | | | | g: Saccharibacteria_{—}genera_{—}incertae_{—}sedis(0.7056) | |
| Ascusb_1985A | 202203086 | Ascusb_1985 | 98.7 | 0.57661 | d: Bacteria(1.0000), p: “Bacteroidetes”(0.9900), c: “Bacteroidia”(0.8910), | 4666 |
| | | | | | o: “Bacteroidales”(0.8019), f: “Prevotellaceae”(0.5212), g: Prevotella(0.3388), | |
| | | | | | s: Prevotella_{—}bryantii(0.0881) | |
| Ascusb_6413A | 202203086 | Ascusb_6413 | 97.3 | 0.52574 | d: Bacteria(1.0000), p: Cyanobacteria/Chloroplast(0.3400), c: Cyanobacteria(0.1156), | 4667 |
| | | | | | f: Family_XIII(0.0127), g: GpXIII(0.0014) | |
| Ascusb_7297A | 202203086 | Ascusb_7297 | 97.8 | 0.53471 | d: Bacteria(1.0000), p: Firmicutes(0.9500), c: Clostridia(0.8835), | 4668 |
| | | | | | o: Clostridiales(0.8217), f: Lachnospiraceae(0.7231), g: Lachnospiracea_{—}incertae_{—}sedis(0.3688), | |
| | | | | | s: Eubacterium_{—}eligens(0.0885) | |
| Ascusb_3718A | 202203086 | Ascusb_3718 | 99.6 | 0.58217 | d: Bacteria(1.0000), p: “Bacteroidetes”(1.0000), c: “Bacteroidia”(1.0000), | 4669 |
| | | | | | o: “Bacteroidales”(1.0000), f: “Prevotellaceae”(0.7800), g: Prevotella(0.6084), | |
| | | | | | s: Prevotella_{—}brevis(0.3590) | |
| Ascusb_132A | 202203086 | Ascusb_132 | 98.7 | 0.57452 | d: Bacteria(1.0000), p: “Bacteroidetes”(1.0000), c: “Bacteroidia”(0.9800), | 4670 |
| | | | | | o: “Bacteroidales”(0.9604), f: “Prevotellaceae”(0.7491), g: Prevotella(0.5768), | |
| | | | | | s: Prevotella_{—}brevis(0.2769) | |
| Ascusb_534A | 202203086 | Ascusb_534 | 99.6 | 0.55524 | d: Bacteria(1.0000), p: “Fibrobacteres”(1.0000), c: “Fibrobacteria”(1.0000), | 4671 |
| | | | | | o: “Fibrobacterales”(1.0000), f: “Fibrobacteraceae”(1.0000), g: Fibrobacter(1.0000), | |
| | | | | | s: Fibrobacter_{—}succinogenes_subsp._elongatus(0.9300) | |
| Ascusb_1179A | 202203086 | Ascusb_1179 | 98.7 | 0.57688 | d: Bacteria(1.0000), p: “Fibrobacteres”(1.0000), c: “Fibrobacteria”(1.0000), | 4672 |
| | | | | | o: “Fibrobacterales”(1.0000), f: “Fibrobacteraceae”(1.0000), g: Fibrobacter(1.0000), | |
| | | | | | s: Fibrobacter_{—}succinogenes_subsp._elongatus(0.8000) | |
| Ascusb_16442A | 202203086 | Ascusb_16442 | 98.2 | 0.51147 | d: Bacteria(1.0000), p: “Fibrobacteres”(1.0000), c: “Fibrobacteria”(1.0000), | 4673 |
| | | | | | o: “Fibrobacterales”(1.0000), f: “Fibrobacteraceae”(1.0000), g: Fibrobacter(1.0000), | |
| | | | | | s: Fibrobacter_{—}succinogenes_subsp._elongatus(0.7700) | |
| Ascusb_9920A | 202203086 | Ascusb_9920 | 99.6 | 0.49637 | d: Bacteria(1.0000), p: “Synergistetes”(0.1000), c: Synergistia(0.0100), | 4674 |
| | | | | | o: Synergistales(0.0010), f: Synergistaceae(0.0001), g: Aminiphilus(0.0000), | |
| | | | | | s: Aminiphilus_{—}circumscriptus(0.0000) | |
| Ascusb_831A | 202203086 | Ascusb_831 | 98.2 | 0.55968 | d: Bacteria(1.0000), p: “Proteobacteria”(0.3900), c: Gammaproteobacteria(0.0936), | 4675 |
| | | | | | o: “Enterobacteriales”(0.0084), f: Enterobacteriaceae(0.0008), g: Buchnera(0.0001) | |
| Ascusb_10378A | 202203086 | Ascusb_10378 | 97.8 | 0.65167 | d: Bacteria(1.0000), p: “Synergistetes”(0.1000), c: Synergistia(0.0100), | 4676 |
| | | | | | o: Synergistales(0.0010), f: Synergistaceae(0.0001), g: Aminiphilus(0.0000), | |
| | | | | | s: Aminiphilus_{—}circumscriptus(0.0000) | |
| Ascusb_18453A | 202203086 | Ascusb_18453 | 98.7 | 0.50535 | d: Bacteria(1.0000), p: Firmicutes(0.3100), c: Bacilli(0.0589), | 4677 |
| | | | | | o: Lactobacillo.0077), f: Leuconostocaceae(0.0006), g: Leuconostoc(0.0000), | |
| | | | | | s: Leuconostoc_{—}gelidum_subsp._aenigmaticum(0.0000) | |
| Ascusb_7360A | 202203086 | Ascusb_7360 | 100 | 0.46247 | d: Bacteria(1.0000), p: Firmicutes(0.7300), c: Clostridia(0.4964), | 4678 |
| | | | | | o: Clostridiales(0.3376), f: Lachnospiraceae(0.1384), g: Lachnospiracea_{—}incertae_{—}sedis(0.0388), | |
| | | | | | s: Eubacterium_{—}xylanophilum(0.0085) | |
| Ascusb_15382A | 202203086 | Ascusb_15382 | 98.2 | 0.50888 | d: Bacteria(1.0000), p: Cyanobacteria/Chloroplast(0.2600), c: Cyanobacteria(0.0676), | 4679 |
| | | | | | f: Family_XI(0.0108), g: GpXI(0.0017) | |
| Ascusb_2895A | 202203086 | Ascusb_2895 | 100 | 0.55463 | d: Bacteria(1.0000), p: Firmicutes(0.9500), c: Erysipelotrichia(0.1235), | 4680 |
| | | | | | o: Erysipelotrichales(0.0161), f: Erysipelotrichaceae(0.0021), g: Turicibacter(0.0002), | |
| | | | | | s: Turicibacter_{—}sanguinis(0.0000) | |
| Ascusb_1147A | 202203086 | Ascusb_1147 | 98.2 | 0.62896 | d: Bacteria(1.0000), p: “Bacteroidetes”(0.9500), c: “Bacteroidia”(0.3325), | 4681 |
| | | | | | o: “Bacteroidales”(0.1164), f: “Porphyromonadaceae”(0.0303), g: Barnesiella(0.0033), | |
| | | | | | s: Barnesiella_{—}viscericola(0.0003) | |
| Ascusb_2965A | 202203086 | Ascusb_2965 | 97.8 | 0.45774 | d: Bacteria(1.0000), p: “Bacteroidetes”(0.9900), c: Flavobacteriia(0.5148), | 4682 |
| | | | | | o: “Flavobacteriales”(0.2677), f: Flavobacteriaceae(0.1205), g: Lutibacter(0.0169), | |
| | | | | | s: Lutibacter_{—}flavus(0.0024) | |
| Ascusb_4492B | 202203086 | Ascusb_4492 | 97.8 | 0.48777 | d: Bacteria(1.0000), p: “Tenericutes”(1.0000), c: Mollicutes(1.0000), | 4683 |
| | | | | | o: Anaeroplasmatales(1.0000), f: Anaeroplasmataceae(1.0000), g: Anaeroplasma(1.0000), | |
| | | | | | s: Anaeroplasma_{—}bactoclasticum(0.7400) | |
| Ascusb_2612A | 202203086 | Ascusb_2612 | 97.8 | 0.54579 | d: Bacteria(1.0000), p: “Tenericutes”(1.0000), c: Mollicutes(1.0000), | 4684 |
| | | | | | o: Anaeroplasmatales(1.0000), f: Anaeroplasmataceae(1.0000), g: Anaeroplasma(1.0000), | |
| | | | | | s: Anaeroplasma_{—}bactoclasticum(0.6200) | |
| Ascusb_363A | 202203086 | Ascusb_363 | 97.3 | 0.69084 | d: Bacteria(1.0000), p: “Tenericutes”(1.0000), c: Mollicutes(1.0000), | 4685 |
| | | | | | o: Anaeroplasmatales(1.0000), f: Anaeroplasmataceae(1.0000), g: Anaeroplasma(1.0000), | |
| | | | | | s: Anaeroplasma_{—}varium(0.9100) | |
| Ascusb_168A | 202203086 | Ascusb_168 | 100 | 0.54575 | d: Bacteria(1.0000), p: “Bacteroidetes”(1.0000), c: “Bacteroidia”(0.9800), | 4686 |
| | | | | | o: “Bacteroidales”(0.9604), f: “Prevotellaceae”(0.3842), g: Prevotella(0.1383), | |
| | | | | | s: Prevotella_{—}brevis(0.0401) | |
| Ascusb_3123A | 202203086 | Ascusb_3123 | 99.1 | 0.65688 | d: Bacteria(1.0000), p: “Tenericutes”(0.2800), c: Mollicutes(0.0784), | 4687 |
| | | | | | o: Entomoplasmatales(0.0180), f: Spiroplasmataceae(0.0041), g: Spiroplasma(0.0010), | |
| | | | | | s: Spiroplasma_{—}clarkii(0.0000) | |
| Ascusb_375A | 202203086 | Ascusb_375 | 99.6 | 0.55878 | d: Bacteria(1.0000), p: Firmicutes(0.9500), c: Clostridia(0.8930), | 4688 |
| | | | | | o: Clostridiales(0.8394), f: Lachnospiraceae(0.7471), g: Lachnospiracea_{—}incertae_{—}sedis(0.2764) | |
| Ascusb_3758A | 202203086 | Ascusb_3758 | 99.6 | 0.45884 | d: Bacteria(1.0000), p: “Bacteroidetes”(0.9800), c: “Bacteroidia”(0.5488), | 4689 |
| | | | | | o: “Bacteroidales”(0.3073), f: “Porphyromonadaceae”(0.1137), g: Barnesiella(0.0148), | |
| | | | | | s: Barnesiella_{—}viscericola(0.0019) | |
| Ascusb_5136A | 202203086 | Ascusb_5136 | 99.6 | 0.72712 | d: Bacteria(1.0000), p: “Bacteroidetes”(0.9700), c: “Bacteroidia”(0.7566), | 4690 |
| | | | | | o: “Bacteroidales”(0.5901), f: “Porphyromonadaceae”(0.3895), g: Coprobacter(0.0467), | |
| | | | | | s: Coprobacter_{—}fastidiosus(0.0056) | |
| Ascusb_2432A | 202203086 | Ascusb_2432 | 98.2 | 0.47083 | d: Bacteria(1.0000), p: “Proteobacteria”(0.8600), c: Alphaproteobacteria(0.5934), | 4691 |
| | | | | | o: Rhizobiales(0.3264), f: Beijerinckiaceae(0.1240), g: Methylocella(0.0236), | |
| | | | | | s: Methylocella_{—}tundrae(0.0045) | |
| Ascusb_120A | 202203086 | Ascusb_120 | 98.2 | 0.50223 | d: Bacteria(1.0000), p: “Bacteroidetes”(1.0000), c: “Bacteroidia”(1.0000), | 4692 |
| | | | | | o: “Bacteroidales”(1.0000), f: “Prevotellaceae”(0.9500), g: Prevotella(0.9025), | |
| | | | | | s: Prevotella_{—}brevis(0.6408) | |
| Ascusb_1150A | 202203086 | Ascusb_1150 | 98.7 | 0.59049 | d: Bacteria(1.0000), p: Firmicutes(0.8000), c: Bacilli(0.6000), | 4693 |
| | | | | | o: Lactobacillobacillaceae(0.1238), g: Lactobacillus(0.0483), | |
| | | | | | s: Lactobacillus_{—}hominis(0.0072) | |
| Ascusb_21A | 202203086 | Ascusb_21 | 98.2 | 0.76005 | d: Bacteria(1.0000), p: “Bacteroidetes”(1.0000), c: “Bacteroidia”(1.0000), | 4694 |
| | | | | | o: “Bacteroidales”(1.0000), f: “Prevotellaceae”(1.0000), g: Prevotella(1.0000), | |
| | | | | | s: Prevotell_{—}acopri(0.3600) | |
| Ascusb_17947A | 202203086 | Ascusb_17947 | 97.8 | 0.5943 | d: Bacteria(1.0000), p: “Bacteroidetes”(1.0000), c: “Bacteroidia”(0.9900), | 4695 |
| | | | | | o: “Bacteroidales”(0.9801), f: “Prevotellaceae”(0.9703), g: Prevotella(0.9606), | |
| | | | | | s: Prevotella_{—}copri(0.3938) | |
| Ascusb_1079A | 202203086 | Ascusb_1079 | 99.6 | 0.55329 | d: Bacteria(1.0000), p: “Bacteroidetes”(1.0000), c: “Bacteroidia”(0.3300), | 4696 |
| | | | | | o: “Bacteroidales”(0.1089), f: Marinilabiliaceae(0.0163), g: Alkaliflexus(0.0023), | |
| | | | | | s: Alkaliflexus_{—}imshenetskii(0.0003) | |
| Ascusb_3851A | 202203086 | Ascusb_3851 | 99.1 | 0.60351 | d: Bacteria(1.0000), p: “Bacteroidetes”(0.9800), c: “Bacteroidia”(0.9310), | 4697 |
| | | | | | o: “Bacteroidales”(0.8844), f: Bacteroidaceae(0.5572), g: Bacteroides(0.3510), | |
| | | | | | s: Bacteroides_{—}rodentium(0.0456) | |
| Ascusb_1344A | 202203086 | Ascusb_1344 | 100 | 0.57516 | d: Bacteria(1.0000), p: “Proteobacteria”(0.7200), c: Alphaproteobacteria(0.4392), | 4698 |
| | | | | | o: Rhodobacterales(0.1098), f: Rhodobacteraceae(0.0274), g: Stappia(0.0052), | |
| | | | | | s: Stappia_{—}indica(0.0010) | |
| Ascusb_2886A | 202203086 | Ascusb_2886 | 97.8 | 0.46944 | d: Bacteria(1.0000), p: “Bacteroidetes”(0.9800), c: “Bacteroidia”(0.9408), | 4699 |
| | | | | | o: “Bacteroidales”(0.9032), f: “Prevotellaceae”(05690), g: Prevotella(0.3300), | |
| | | | | | s: Prevotella_{—}brevis(0.1518) | |
| Ascusb_379A | 202203086 | Ascusb_379 | 99.6 | 0.58642 | d: Bacteria(1.0000), p: “Bacteroidetes”(1.0000), c: “Bacteroidia”(1.0000), | 4700 |
| | | | | | o: “Bacteroidales”(1.0000), f: “Prevotellaceae”(0.9300), g: Prevotella(0.8649), | |
| | | | | | s: Prevotella_{—}ruminicola(0.6919) | |
| Ascusb_2179A | 202203086 | Ascusb_2179 | 99.6 | 0.65257 | d: Bacteria(1.0000), p: “Synergistetes”(0.2600), c: Synergistia(0.0676), | 4701 |
| | | | | | o: Synergistales(0.0176), f: Synergistaceae(0.0046), g: Aminiphilus(0.0012), | |
| | | | | | s: Aminiphilus_{—}circumscriptus(0.0003) | |
| Ascusb_1068A | 202203086 | Ascusb_1068 | 97.8 | 0.46566 | d: Bacteria(1.0000), p: “Bacteroidetes”(0.8100), c: Sphingobacteriia(0.2187), | 4702 |
| | | | | | o: “Sphingobacteriales”(0.0590), f: Chitinophagaceae(0.0124), g: Chitinophaga(0.0011), | |
| | | | | | s: Chitinophaga_{—}qingshengii(0.0001) | |
| Ascusb_896A | 202203086 | Ascusb_896 | 100 | 0.50845 | d: Bacteria(1.0000), p: Firmicutes(0.8700), c: Clostridia(0.7569), | 4703 |
| | | | | | o: Clostridiales(0.6585), f: Lachnospiraceae(0.5466), g: Syntrophococcus(0.1968), | |
| | | | | | s: Syntrophococcus_{—}sucromutans(0.0708) | |
| Ascusb_301A | 202203086 | Ascusb_301 | 97.8 | 0.47494 | d: Bacteria(1.0000), p: “Bacteroidetes”(1.0000), c: “Bacteroidia”(0.9500), | 4704 |
| | | | | | o: “Bacteroidales”(0.9025), f: “Prevotellaceae”(06498), g: Prevotella(0.4549), | |
| | | | | | s: Prevotella_{—}brevis(0.2138) | |
| Ascusb_15140A | 202203086 | Ascusb_15140 | 100 | 0.50718 | d: Bacteria(1.0000), p: “Bacteroidetes”(1.0000), c: “Bacteroidia”(0.5800), | 4705 |
| | | | | | o: “Bacteroidales”(0.3364), f: “Porphyromonadaceae”(0.1043), g: Parabacteroides(0.0167), | |
| | | | | | s: Parabacteroides_{—}gordonii(0.0020) | |
| Ascusb_16891A | 202203086 | Ascusb_16891 | 99.1 | 0.44944 | d: Bacteria(1.0000), p: “Bacteroidetes”(0.9900), c: Flavobacteriia(0.4356), | 4706 |
| | | | | | o: “Flavobacteriales”(0.1917), f: Flavobacteriaceae(0.0805), g: Salinimicrobium(0.0113), | |
| | | | | | s: Salinimicrobium_{—}catena(0.0011) | |
| Ascusb_4162A | 202203086 | Ascusb_4162 | 98.2 | 0.45032 | d: Bacteria(1.0000), p: Firmicutes(0.7700), c: Clostridia(0.4851), | 4707 |
| | | | | | o: Clostridiales(0.2959), f: Ruminococcaceae(0.1509), g: Hydrogenoanaerobacterium(0.0317), | |
| | | | | | s: Hydrogenoanaerobacterium_{—}saccharovorans(0.0067) | |
| Ascusb_2541A | 202203086 | Ascusb_2541 | 100 | 0.58917 | d: Bacteria(1.0000), p: Firmicutes(0.7100), c: Erysipelotrichia(0.1633), | 4708 |
| | | | | | o: Erysipelotrichales(0.0376), f: Erysipelotrichaceae(0.0086), g: Turicibacter(0.0015), | |
| | | | | | s: Turicibacter_{—}sanguinis(0.0002) | |
| Ascusb_445A | 202203086 | Ascusb_445 | 97.3 | 0.5471 | d: Bacteria(1.0000), p: “Bacteroidetes”(1.0000), c: “Bacteroidia”(1.0000), | 4709 |
| | | | | | o: “Bacteroidales”(1.0000), f: “Prevotellaceae”(1.0000), g: Prevotella(1.0000), | |
| | | | | | s: Prevotella_{—}ruminicola(0.8700) | |
| Ascusb_2860A | 202203086 | Ascusb_2860 | 98.7 | 0.44357 | d: Bacteria(1.0000), p: “Bacteroidetes”(0.7400), c: “Bacteroidia”(0.3182), | 4710 |
| | | | | | o: “Bacteroidales”(0.1368), f: “Porphyromonadaceae”(0.0397), g: Coprobacter(0.0036), | |
| | | | | | s: Coprobacter_{—}fastidiosus(0.0003) | |
| Ascusb_4385A | 202203086 | Ascusb_4385 | 98.7 | 0.47431 | d: Bacteria(1.0000), p: “Proteobacteria”(0.2400), c: Gammaproteobacteria(0.0576), | 4711 |
| | | | | | o: “Vibrionales”(0.0075), f: Vibrionaceae(0.0010), g: Vibrio(0.0001), | |
| | | | | | s: Vibrio_{—}diazotrophicus(0.0000) | |
| Ascusb_4740A | 202203086 | Ascusb_4740 | 99.1 | 0.52744 | d: Bacteria(1.0000), p: “Spirochaetes”(0.9900), c: Spirochaetia(0.9801), | 4712 |
| | | | | | o: Spirochaetales(0.9703), f: Spirochaetaceae(0.9606), g: Treponema(0.8934), | |
| | | | | | s: Treponema_{—}bryantii(0.4645) | |
| Ascusb_649A | 202203086 | Ascusb_649 | 97.8 | 0.69201 | d: Bacteria(1.0000), p: Firmicutes(0.7800), c: Clostridia(0.5304), | 4713 |
| | | | | | o: Clostridiales(0.3607), f: Christensenellaceae(0.0505), g: Christensenella(0.0071), | |
| | | | | | s: Christensenella_{—}minuta(0.0010) | |
| Ascusb_4058A | 202203086 | Ascusb_4058 | 98.2 | 0.62023 | d: Bacteria(1.0000), p: “Bacteroidetes”(1.0000), c: Cytophagia(0.1800), | 4714 |
| | | | | | o: Cytophagales(0.0324), f: Flammeovirgaceae(0.0045), g: Sediminitomix(0.0006), | |
| | | | | | s: Sediminitomix_{—}flava(0.0001) | |
| Ascusb_3805A | 202203087 | Ascusb_3805 | 97.8 | 0.53943 | d: Bacteria(1.0000), p: “Bacteroidetes”(0.9800), c: Flavobacteriia(0.5978), | 4715 |
| | | | | | o: “Flavobacteriales”(0.3647), f: Cryomorphaceae(0.1058), g: Wandonia(0.0222), | |
| | | | | | s: Wandonia_{—}haliotis(0.0047) | |
| Ascusb_514A | 202203087 | Ascusb_514 | 99.1 | 0.67484 | d: Bacteria(1.0000), p: Firmicutes(0.9400), c: Clostridia(0.7708), | 4716 |
| | | | | | o: Clostridiales(0.6012), f: Ruminococcaceae(0.2706), g: Clostridium_III(0.1028), | |
| | | | | | s: Clostridium_{—}termitidis(0.0226) | |
| Ascusb_1953A | 202203087 | Ascusb_1953 | 99.1 | 0.61816 | d: Bacteria(1.0000), p: “Spirochaetes”(1.0000), c: Spirochaetia(1.0000), | 4717 |
| | | | | | o: Spirochaetales(1.0000), f: Spirochaetaceae(1.0000), g: Treponema(1.0000), | |
| | | | | | s: Treponema_{—}bryantii(1.0000) | |
| Ascusb_1959A | 202203087 | Ascusb_1959 | 97.3 | 0.69533 | d: Bacteria(1.0000), p: Firmicutes(0.7900), c: Clostridia(0.4740), | 4718 |
| | | | | | o: Clostridiales(0.2844), f: Ruminococcaceae(0.1422), g: Hydrogenoanaerobacterium(0.0355), | |
| | | | | | s: Hydrogenoanaerobacterium_{—}saccharovorans(0.0089) | |
| Ascusb_3898A | 202203087 | Ascusb_3898 | 99.1 | 0.59142 | d: Bacteria(1.0000), p: Firmicutes(0.9200), c: Clostridia(0.8372), | 4719 |
| | | | | | o: Clostridiales(0.7619), f: Lachnospiraceae(0.6552), g: Syntrophococcus(0.3604), | |
| | | | | | s: Syntrophococcus_{—}sucromutans(0.1982) | |
| Ascusb_375B | 202203087 | Ascusb_375 | 98.2 | 0.55878 | d: Bacteria(1.0000), p: Firmicutes(0.9500), c: Clostridia(0.8930), | 4720 |
| | | | | | o: Clostridiales(0.8394), f: Lachnospiraceae(0.7471), g: Lachnospiracea_{—}incertae_{—}sedis(0.2764) | |
| Ascusb_434A | 202203087 | Ascusb_434 | 100 | 0.51596 | d: Bacteria(1.0000), p: Firmicutes(0.6900), c: Bacilli(0.1518), | 4721 |
| | | | | | o: Bacillales(0.0167), f: Planococcaceae(0.0010), g: Ureibacillus(0.0001), | |
| | | | | | s: Ureibacillus_{—}thermosphaericus(0.0000) | |
| Ascusb_1135A | 202203087 | Ascusb_1135 | 99.1 | 0.55757 | d: Bacteria(1.0000), p: Firmicutes(0.7900), c: Clostridia(0.5056), | 4722 |
| | | | | | o: Clostridiales(0.3084), f: Clostridiaceae_1(0.1049), g: Caloramator(0.0147), | |
| | | | | | s: Caloramator_{—}australicus(0.0015) | |
| Ascusb_1834A | 202203087 | Ascusb_1834 | 99.1 | 0.60998 | d: Bacteria(1.0000), p: Firmicutes(0.9800), c: Clostridia(0.9604), | 4723 |
| | | | | | o: Clostridiales(0.9412), f: Lachnospiraceae(0.8753), g: Lachnospiracea_{—}incertae_{—}sedis(0.4814) | |
| Ascusb_2594B | 202203087 | Ascusb_2594 | 98.7 | 0.69344 | d: Bacteria(1.0000), p: “Spirochaetes”(0.8800), c: Spirochaetia(0.7744), | 4724 |
| | | | | | o: Spirochaetales(0.6815), f: Spirochaetaceae(0.5997), g: Treponema(0.5277), | |
| | | | | | s: Treponemabryantii(0.3800) | |
| Ascusb_4126A | 202203087 | Ascusb_4126 | 98.7 | 0.45512 | d: Bacteria(1.0000), p: “Bacteroidetes”(0.9800), c: “Bacteroidia”(0.1960), | 4725 |
| | | | | | o: “Bacteroidales”(0.0392), f: Marinilabiliaceae(0.0055), g: Saccharicrinis(0.0005), | |
| | | | | | s: Saccharicrinis_{—}fermentans(0.0000) | |
| Ascusb_310A | 202203087 | Ascusb_310 | 99.6 | 0.51086 | d: Bacteria(1.0000), p: “Bacteroidetes”(1.0000), c: “Bacteroidia”(1.0000), | 4726 |
| | | | | | o: “Bacteroidales”(1.0000), f: “Prevotellaceae”(0.9900), g: Prevotella(0.9801), | |
| | | | | | s: Prevotella_{—}ruminicola(0.7841) | |
| Ascusb_211B | 202203087 | Ascusb_211 | 99.1 | 0.58809 | d: Bacteria(1.0000), p: “Bacteroidetes”(1.0000), c: “Bacteroidia”(1.0000), | 4727 |
| | | | | | o: “Bacteroidales”(1.0000), f: “Prevotellaceae”(0.9800), g: Prevotella(0.9604), | |
| | | | | | s: Prevotella_{—}ruminicola(0.7395) | |
| Ascusb_3385A | 202203087 | Ascusb_3385 | 97.8 | 0.55727 | d: Bacteria(1.0000), p: “Bacteroidetes”(0.7900), c: “Bacteroidia”(0.2765), | 4728 |
| | | | | | o: “Bacteroidales”(0.0968), f: “Porphyromonadaceae”(0.0203), g: Butyricimonas(0.0014), | |
| | | | | | s: Butyricimonas_{—}faecihominis(0.0001) | |
| Ascusb_20566B | 202203087 | Ascusb_20566 | 99.1 | 0.50162 | d: Bacteria(1.0000), p: “Tenericutes”(0.2600), c: Mollicutes(0.0676), | 4729 |
| | | | | | o: Entomoplasmatales(0.0149), f: Spiroplasmataceae(0.0033), g: Spiroplasma(0.0007), | |
| | | | | | s: Spiroplasma_{—}platyhelix(0.0001) | |
| Ascusb_888A | 202203087 | Ascusb_888 | 99.1 | 0.59563 | d: Bacteria(1.0000), p: Firmicutes(0.5600), c: Clostridia(0.2744), | 4730 |
| | | | | | o: Clostridiales(0.1345), f: Ruminococcaceae(0.0282), g: Hydrogenoanaerobacterium(0.0054), | |
| | | | | | s: Hydrogenoanaerobacterium_{—}saccharovorans(0.0010) | |
| Ascusb_2987B | 202203087 | Ascusb_2987 | 98.2 | 0.48922 | d: Bacteria(1.0000), p: “Bacteroidetes”(0.7800), c: “Bacteroidia”(0.4524), | 4731 |
| | | | | | o: “Bacteroidales”(0.2624), f: “Porphyromonadaceae”(0.0997), g: Tannerella(0.0209), | |
| | | | | | s: Tannerella_{—}forsythia(0.0044) | |
| Ascusb_2835A | 202203087 | Ascusb_2835 | 97.8 | 0.55473 | d: Bacteria(1.0000), p: “Bacteroidetes”(0.8700), c: “Bacteroidia”(0.5829), | 4732 |
| | | | | | o: “Bacteroidales”(0.3905), f: “Porphyromonadaceae”(0.1992), g: Parabacteroides(0.0478), | |
| | | | | | s: Parabacteroides_{—}merdae(0.0057) | |
| Ascusb_1731A | 202203087 | Ascusb_1731 | 100 | 0.63469 | d: Bacteria(1.0000), p: “Spirochaetes”(0.8700), c: Spirochaetia(0.7569), | 4733 |
| | | | | | o: Spirochaetales(0.6585), f: Spirochaetaceae(0.5729), g: Treponema(0.4182), | |
| | | | | | s: Treponema_{—}stenostreptum(0.0627) | |
| Ascusb_1889B | 202203087 | Ascusb_1889 | 98.7 | 0.50423 | d: Bacteria(1.0000), p: “Bacteroidetes”(1.0000), c: “Bacteroidia”(1.0000), | 4734 |
| | | | | | o: “Bacteroidales”(1.0000), f: “Prevotellaceae”(0.9900), g: Prevotella(0.9801), | |
| | | | | | s: Prevotella_{—}brevis(0.9605) | |
| Ascusb_1829A | 202203087 | Ascusb_1829 | 97.8 | 0.5573 | d: Bacteria(1.0000), p: “Bacteroidetes”(1.0000), c: “Bacteroidia”(1.0000), | 4735 |
| | | | | | o: “Bacteroidales”(1.0000), f: “Prevotellaceae”(0.9900), g: Prevotella(0.9801), | |
| | | | | | s: Prevotella_{—}brevis(0.8919) | |
| Ascusb_2744A | 202203087 | Ascusb_2744 | 97.8 | 0.50699 | d: Bacteria(1.0000), p: “Bacteroidetes”(1.0000), c: “Bacteroidia”(1.0000), | 4736 |
| | | | | | o: “Bacteroidales”(1.0000), f: “Prevotellaceae”(0.9800), g: Prevotella(0.9604), | |
| | | | | | s: Prevotella_{—}brevis(0.8548) | |
| Ascusb_1366B | 202203087 | Ascusb_1366 | 97.3 | 0.89995 | d: Bacteria(1.0000), p: Candidatus_Saccharibacteria(0.7700), | 4737 |
| | | | | | g: Saccharibacteria_{—}genera_{—}incertae_{—}sedis(0.5929) | |
| Ascusb_2205A | 202203087 | Ascusb_2205 | 100 | 0.60723 | d: Bacteria(1.0000), p: “Bacteroidetes”(1.0000), c: “Bacteroidia”(0.9700), | 4738 |
| | | | | | o: “Bacteroidales”(0.9409), f: Bacteroidaceae(0.9127), g: Bacteroides(0.8853), | |
| | | | | | s: Bacteroides_{—}coprocola(0.3718) | |
| Ascusb_352A | 202203087 | Ascusb_352 | 100 | 0.74315 | d: Bacteria(1.0000), p: “Armatimonadetes”(0.1000), | 4739 |
| | | | | | g: Armatimonadetes_gp4(0.0080) | |
| Ascusb_1018A | 202203087 | Ascusb_1018 | 99.6 | 0.69809 | d: Bacteria(1.0000), p: Firmicutes(0.9400), c: Clostridia(0.8836), | 4740 |
| | | | | | o: Clostridiales(0.8306), f: Lachnospiraceae(0.7475), g: Lachnobacterium(0.0972), | |
| | | | | | s: Lachnobacterium_{—}bovis(0.0126) | |
| Ascusb_2776A | 202203087 | Ascusb_2776 | 99.1 | 0.48701 | d: Bacteria(1.0000), p: “Proteobacteria”(0.8700), c: Alphaproteobacteria(0.5916), | 4741 |
| | | | | | o: Rhodobacterales(0.1597), f: Rhodobacteraceae(0.0431), g: Stappia(0.0078), | |
| | | | | | s: Stappia_{—}indica(0.0014) | |
| Ascusb_2606B | 202203087 | Ascusb_2606 | 100 | 0.76747 | d: Bacteria(1.0000), p: “Spirochaetes”(0.9600), c: Spirochaetia(0.9216), | 4742 |
| | | | | | o: Spirochaetales(0.8847), f: Spirochaetaceae(0.8493), g: Treponema(0.7814), | |
| | | | | | s: Treponema_{—}denticola(0.2422) | |
| Ascusb_1150B | 202203087 | Ascusb_1150 | 99.6 | 0.59049 | d: Bacteria(1.0000), p: Firmicutes(0.8000), c: Bacilli(0.6000), | 4743 |
| | | | | | o: Lactobacillobacillaceae(0.1238), g: Lactobacillus(0.0483), | |
| | | | | | s: Lactobacillus_{—}hominis(0.0072) | |
| Ascusb_287A | 202203087 | Ascusb_287 | 99.6 | 0.6612 | d: Bacteria(1.0000), p: Firmicutes(0.8600), c: Clostridia(0.7138), | 4744 |
| | | | | | o: Clostridiales(0.5925), f: Ruminococcaceae(0.4799), g: Hydrogenoanaerobacterium(0.1728), | |
| | | | | | s: Hydrogenoanaerobacterium_{—}saccharovorans(0.0622) | |
| Ascusb_301B | 202203087 | Ascusb_301 | 97.3 | 0.47494 | d: Bacteria(1.0000), p: “Bacteroidetes”(1.0000), c: “Bacteroidia”(0.9500), | 4745 |
| | | | | | o: “Bacteroidales”(0.9025), f: “Prevotellaceae”(06498), g: Prevotella(0.4549), | |
| | | | | | s: Prevotella_{—}brevis(0.2138) | |
| Ascusb_4975A | 202203087 | Ascusb_4975 | 100 | 0.62611 | d: Bacteria(1.0000), p: “Proteobacteria”(0.9000), c: Alphaproteobacteria(0.7470), | 4746 |
| | | | | | o: Rhizobiales(0.5229), f: Hyphomicrobiaceae(0.1516), g: Devosia(0.0227), | |
| | | | | | s: Devosia_{—}neptuniae(0.0032) | |
| Ascusb_4846A | 202203087 | Ascusb_4846 | 100 | 0.59965 | d: Bacteria(1.0000), p: “Spirochaetes”(0.9000), c: Spirochaetia(0.8100), | 4747 |
| | | | | | o: Spirochaetales(0.7290), f: Spirochaetaceae(0.6561), g: Treponema(0.5708), | |
| | | | | | s: Treponemabryantii(0.2454) | |
| Ascusb_1929A | 202203087 | Ascusb_1929 | 97.3 | 0.82667 | d: Bacteria(1.0000), p: Firmicutes(0.4900), c: Clostridia(0.1960), | 4748 |
| | | | | | o: Clostridiales(0.0784), f: Ruminococcaceae(0.0141), g: Hydrogenoanaerobacterium(0.0020), | |
| | | | | | s: Hydrogenoanaerobacterium_{—}saccharovorans(0.0003) | |
| Ascusb_2866A | 202203087 | Ascusb_2866 | 97.3 | 0.71822 | d: Bacteria(1.0000), p: Firmicutes(0.9600), c: Clostridia(0.8448), | 4749 |
| | | | | | o: Clostridiales(0.7434), f: Lachnospiraceae(0.3717), g: Cellulosilyticum(0.0818), | |
| | | | | | s: Cellulosilyticum_{—}ruminicola(0.0180) | |
| Ascusb_489B | 202203087 | Ascusb_489 | 99.6 | 0.45079 | d: Bacteria(1.0000), p: “Bacteroidetes”(1.0000), c: “Bacteroidia”(0.2400), | 4750 |
| | | | | | o: “Bacteroidales”(0.0576), f: “Rikenellaceae”(0.0063), g: Alistipes(0.0007), | |
| | | | | | s: Alistipes_{—}finegoldii(0.0001) | |
| Ascusb_3250A | 202203087 | Ascusb_3250 | 98.2 | 0.46449 | d: Bacteria(1.0000), p: “Fibrobacteres”(1.0000), c: “Fibrobacteria”(1.0000), | 4751 |
| | | | | | o: “Fibrobacterales”(1.0000), f: “Fibrobacteraceae”(1.0000), g: Fibrobacter(1.0000), | |
| | | | | | s: Fibrobacter_{—}succinogenes_subsp._succinogenes(0.9700) | |
| Ascusb_19138A | 202203087 | Ascusb_19138 | 97.3 | 0.56852 | d: Bacteria(1.0000), p: “Fibrobacteres”(1.0000), c: “Fibrobacteria”(1.0000), | 4752 |
| | | | | | o: “Fibrobacterales”(1.0000), f: “Fibrobacteraceae”(1.0000), g: Fibrobacter(1.0000), | |
| | | | | | s: Fibrobacter_{—}succinogenes_subsp._succinogenes(0.9800) | |
| Ascusb_300B | 202203087 | Ascusb_300 | 97.3 | 0.71072 | d: Bacteria(1.0000), p: “Fibrobacteres”(1.0000), c: “Fibrobacteria”(1.0000), | 4753 |
| | | | | | o: “Fibrobacterales”(1.0000), f: “Fibrobacteraceae”(1.0000), g: Fibrobacter(1.0000), | |
| | | | | | s: Fibrobacter_{—}succinogenes_subsp._succinogenes(0.9700) | |
| Ascusb_2895B | 202203087 | Ascusb_2895 | 99.6 | 0.55463 | d: Bacteria(1.0000), p: Firmicutes(0.9500), c: Erysipelotrichia(0.1235), | 4754 |
| | | | | | o: Erysipelotrichales(0.0161), f: Erysipelotrichaceae(0.0021), g: Turicibacter(0.0002), | |
| | | | | | s: Turicibacter_{—}sanguinis(0.0000) | |
| Ascusb_3533A | 202203087 | Ascusb_3533 | 99.1 | 0.47571 | d: Bacteria(1.0000), p: Firmicutes(0.7700), c: Clostridia(0.5544), | 4755 |
| | | | | | o: Clostridiales(0.3936), f: Ruminococcaceae(0.2440), g: Hydrogenoanaerobacterium(0.0488), | |
| | | | | | s: Hydrogenoanaerobacteriumsaccharovorans(0.0098) | |
| Ascusb_8024C | 202203087 | Ascusb_8024 | 97.3 | 0.48325 | d: Bacteria(1.0000), p: “Bacteroidetes”(0.9900), c: Flavobacteriia(0.6039), | 4756 |
| | | | | | o: “Flavobacteriales”(0.3684), f: Cryomorphaceae(0.0847), g: Wandonia(0.0195), | |
| | | | | | s: Wandonia_{—}haliotis(0.0045) | |
| Ascusb_2440A | 202203087 | Ascusb_2440 | 99.1 | 0.58769 | d: Bacteria(1.0000), p: “Spirochaetes”(0.8100), c: Spirochaetia(0.6561), | 4757 |
| | | | | | o: Spirochaetales(0.5314), f: Spirochaetaceae(0.4305), g: Treponema(0.2798), | |
| | | | | | s: Treponema_{—}caldarium(0.0783) | |
| Ascusb_6714A | 202203087 | Ascusb_6714 | 100 | 0.71683 | d: Bacteria(1.0000), p: Firmicutes(0.5500), c: Clostridia(0.1980), | 4758 |
| | | | | | o: Clostridiales(0.0713), f: Ruminococcaceae(0.0093), g: Hydrogenoanaerobacterium(0.0012), | |
| | | | | | s: Hydrogenoanaerobacteriumsaccharovorans(0.0002) | |
| Ascusb_1059A | 202203087 | Ascusb_1059 | 99.6 | 0.5449 | d: Bacteria(1.0000), p: “Bacteroidetes”(0.9400), c: “Bacteroidia”(0.5828), | 4759 |
| | | | | | o: “Bacteroidales”(0.3613), f: “Rikenellaceae”(0.0939), g: Anaerocella(0.0103), | |
| | | | | | s: Anaerocella_{—}delicata(0.0011) | |
| Ascusb_3342A | 202203087 | Ascusb_3342 | 99.6 | 0.68053 | d: Bacteria(1.0000), p: Firmicutes(0.8700), c: Clostridia(0.6612), | 4760 |
| | | | | | o: Clostridiales(0.4364), f: Clostridiales_Incertae_Sedis_IV(0.0742), g: Caldicoprobacter(0.0126), | |
| | | | | | s: Caldicoprobacter_{—}guelmensis(0.0013) | |
| Ascusb_1107A | 202203087 | Ascusb_1107 | 98.2 | 0.53618 | d: Bacteria(1.0000), p: “Bacteroidetes”(0.8600), c: “Bacteroidia”(0.3526), | 4761 |
| | | | | | o: “Bacteroidales”(0.1446), f: “Rikenellaceae”(0.0318), g: Anaerocella(0.0032), | |
| | | | | | s: Anaerocella_{—}delicata(0.0003) | |
| Ascusb_3810A | 202203087 | Ascusb_3810 | 100 | 0.65342 | d: Bacteria(1.0000), p: Firmicutes(0.5800), c: Bacilli(0.2726), | 4762 |
| | | | | | o: Lactobacillustobacillaceae(0.0153), g: Lactobacillus(0.0029) | |
| Ascusb_2736A | 202203087 | Ascusb_2736 | 100 | 0.4893 | d: Bacteria(1.0000), p: “Bacteroidetes”(1.0000), c: “Bacteroidia”(0.9800), | 4763 |
| | | | | | o: “Bacteroidales”(0.9604), f: “Prevotellaceae”(0.9028), g: Prevotella(0.8396), | |
| | | | | | s: Prevotella_{—}brevis(0.6717) | |
| Ascusb_8863A | 202203087 | Ascusb_8863 | 99.6 | 0.54178 | d: Bacteria(1.0000), p: “Tenericutes”(0.9500), c: Mollicutes(0.9025), | 4764 |
| | | | | | o: Anaeroplasmatales(0.7130), f: Anaeroplasmataceae(0.5633), g: Anaeroplasma(0.4450), | |
| | | | | | s: Anaeroplasma_{—}abactoclasticum(0.3026) | |
| Ascusb_1924A | 202203087 | Ascusb_1924 | 98.7 | 0.59307 | d: Bacteria(1.0000), p: “Tenericutes”(0.8400), c: Mollicutes(0.7056), | 4765 |
| | | | | | o: Anaeroplasmatales(0.4304), f: Anaeroplasmataceae(0.2626), g: Anaeroplasma(0.1602), | |
| | | | | | s: Anaeroplasma_{—}abactoclasticum(0.0817) | |
| Ascusb_1189A | 202203087 | Ascusb_1189 | 98.7 | 0.58266 | d: Bacteria(1.0000), p: “Tenericutes”(0.8800), c: Mollicutes(0.7744), | 4766 |
| | | | | | o: Anaeroplasmatales(0.5653), f: Anaeroplasmataceae(0.4127), g: Anaeroplasma(0.3013), | |
| | | | | | s: Anaeroplasma_{—}abactoclasticum(0.1988) | |
| Ascusb_2725A | 202203087 | Ascusb_2725 | 98.2 | 0.6506 | d: Bacteria(1.0000), p: “Tenericutes”(0.8600), c: Mollicutes(0.7396), | 4767 |
| | | | | | o: Anaeroplasmatales(0.5547), f: Anaeroplasmataceae(0.4160), g: Anaeroplasma(0.3120), | |
| | | | | | s: Anaeroplasma_{—}abactoclasticum(0.2184) | |
| Ascusb_197A | 202203087 | Ascusb_197 | 99.6 | 0.59567 | d: Bacteria(1.0000), p: Firmicutes(0.7100), c: Clostridia(0.4686), | 4768 |
| | | | | | o: Clostridiales(0.2812), f: Ruminococcaceae(0.0619), g: Clostridium_IV(0.0043), | |
| | | | | | s: Clostridium_{—}cellulosi(0.0003) | |
| Ascusb_4663A | 202203087 | Ascusb_4663 | 98.2 | 0.48011 | d: Bacteria(1.0000), p: Firmicutes(0.7100), c: Clostridia(0.4615), | 4769 |
| | | | | | o: Clostridiales(0.2769), f: Ruminococcaceae(0.0775), g: Clostridium_IV(0.0085), | |
| | | | | | s: Clostridium_{—}cellulosi(0.0009) | |
| Ascusb_6110A | 202203087 | Ascusb_6110 | 97.8 | 0.53627 | d: Bacteria(1.0000), p: Firmicutes(0.6500), c: Clostridia(0.3510), | 4770 |
| | | | | | o: Clostridiales(0.1755), f: Clostridiaceae_1(0.0211), g: Proteiniclasticum(0.0011), | |
| | | | | | s: Proteiniclasticum_{—}ruminis(0.0001) | |
| Ascusb_154A | 202203087 | Ascusb_154 | 99.6 | 0.55655 | d: Bacteria(1.0000), p: “Bacteroidetes”(1.0000), c: “Bacteroidia”(1.0000), | 4771 |
| | | | | | o: “Bacteroidales”(1.0000), f: “Prevotellaceae”(0.7000), g: Prevotella(0.4900), | |
| | | | | | s: Prevotella_{—}brevis(0.1470) | |
| Ascusb_13706A | 202203087 | Ascusb_13706 | 98.2 | 0.61421 | d: Bacteria(1.0000), p: Firmicutes(0.8400), c: Clostridia(0.5460), | 4772 |
| | | | | | o: Clostridiales(0.3549), f: Ruminococcaceae(0.1987), g: Hydrogenoanaerobacterium(0.0696), | |
| | | | | | s: Hydrogenoanaerobacterium_{—}saccharovorans(0.0243) | |
| Ascusb_631A | 202203087 | Ascusb_631 | 100 | 0.54883 | d: Bacteria(1.0000), p: “Spirochaetes”(1.0000), c: Spirochaetia(1.0000), | 4773 |
| | | | | | o: Spirochaetales(1.0000), f: Spirochaetaceae(1.0000), g: Treponema(1.0000), | |
| | | | | | s: Treponema_{—}bryantii(0.9900) | |
| Ascusb_4119B | 202203087 | Ascusb_4119 | 98.7 | 0.61021 | d: Bacteria(1.0000), p: Firmicutes(0.9400), c: Clostridia(0.7802), | 4774 |
| | | | | | o: Clostridiales(0.5930), f: Ruminococcaceae(0.3321), g: Clostridium_III(0.1461), | |
| | | | | | s: Clostridium_{—}termitidis(0.0438) | |
| Ascusb_7475A | 202203087 | Ascusb_7475 | 97.8 | 0.5128 | d: Bacteria(1.0000), p: “Spirochaetes”(1.0000), c: Spirochaetia(1.0000), | 4775 |
| | | | | | o: Spirochaetales(1.0000), f: Spirochaetaceae(1.0000), g: Treponema(1.0000), | |
| | | | | | s: Treponema_{—}bryantii(0.9800) | |
| Ascusb_2817A | 202203087 | Ascusb_2817 | 99.1 | 0.52199 | d: Bacteria(1.0000), p: Firmicutes(0.8700), c: Clostridia(0.7047), | 4776 |
| | | | | | o: Clostridiales(0.5708), f: Lachnospiraceae(0.2626), g: Lachnospiracea_{—}incertae_{—}sedis(0.0604), | |
| | | | | | s: Eubacterium_{—}ruminantium(0.0079) | |
| Ascusb_1368A | 202203087 | Ascusb_1368 | 100 | 0.48461 | d: Bacteria(1.0000), p: “Bacteroidetes”(1.0000), c: “Bacteroidia”(0.9900), | 4777 |
| | | | | | o: “Bacteroidales”(0.9801), f: “Prevotellaceae”(0.9017), g: Prevotella(0.8296), | |
| | | | | | s: Prevotella_{—}ruminicola(0.6553) | |
| Ascusb_1332A | 202203087 | Ascusb_1332 | 99.1 | 0.6881 | d: Bacteria(1.0000), p: “Bacteroidetes”(1.0000), c: “Bacteroidia”(1.0000), | 4778 |
| | | | | | o: “Bacteroidales”(1.0000), f: “Prevotellaceae”(0.8700), g: Prevotella(0.7569), | |
| | | | | | s: Prevotella_{—}ruminicola(0.4844) | |
| Ascusb_12394A | 202203087 | Ascusb_12394 | 98.7 | 0.43932 | d: Bacteria(1.0000), p: “Bacteroidetes”(1.0000), c: “Bacteroidia”(1.0000), | 4779 |
| | | | | | o: “Bacteroidales”(1.0000), f: “Prevotellaceae”(0.8700), g: Prevotella(0.7569), | |
| | | | | | s: Prevotella_{—}ruminicola(0.4920) | |
| Ascusb_2017A | 202203087 | Ascusb_2017 | 98.7 | 0.55244 | d: Bacteria(1.0000), p: “Bacteroidetes”(1.0000), c: “Bacteroidia”(1.0000), | 4780 |
| | | | | | o: “Bacteroidales”(1.0000), f: “Prevotellaceae”(09300), g: Prevotella(0.8649), | |
| | | | | | s: Prevotella_{—}ruminicola(0.6919) | |
| Ascusb_9039A | 202203087 | Ascusb_9039 | 98.2 | 0.5324 | d: Bacteria(1.0000), p: “Bacteroidetes”(1.0000), c: “Bacteroidia”(1.0000), | 4781 |
| | | | | | o: “Bacteroidales”(1.0000), f: “Prevotellaceae”(0.9100), g: Prevotella(0.8281), | |
| | | | | | s: Prevotella_{—}ruminicola(0.6542) | |
| Ascusb_4081B | 202203087 | Ascusb_4081 | 99.1 | 0.71508 | d: Bacteria(1.0000), p: Firmicutes(0.2900), c: Bacilli(0.0696), | 4782 |
| | | | | | o: Bacillales(0.0146), f: Staphylococcaceae(0.0025), g: Staphylococcus(0.0004), | |
| | | | | | s: Staphylococcus_{—}rostri(0.0000) | |
| Ascusb_9033A | 202203087 | Ascusb_9033 | 97.3 | 0.51839 | d: Bacteria(1.0000), p: Firmicutes(0.3100), c: Bacilli(0.0651), | 4783 |
| | | | | | o: Bacillales(0.0104), f: Staphylococcaceae(0.0016), g: Staphylococcus(0.0002), | |
| | | | | | s: Staphylococcus_{—}rostri(0.0000) | |
| Ascusb_7414A | 202203087 | Ascusb_7414 | 97.3 | 0.56474 | d: Bacteria(1.0000), p: Firmicutes(0.3700), c: Bacilli(0.1147), | 4784 |
| | | | | | o: Bacillales(0.0321), f: Staphylococcaceae(0.0084), g: Staphylococcus(0.0021), | |
| | | | | | s: Staphylococcus_{—}rostri(0.0003) | |
| Ascusb_957B | 202203087 | Ascusb_957 | 99.1 | 0.60721 | d: Bacteria(1.0000), p: “Spirochaetes”(1.0000), c: Spirochaetia(1.0000), | 4785 |
| | | | | | o: Spirochaetales(1.0000), f: Spirochaetaceae(1.0000), g: Treponema(1.0000), | |
| | | | | | s: Treponema_{—}bryantii(0.9900) | |
| Ascusb_1961B | 202203087 | Ascusb_1961 | 98.2 | 0.51577 | d: Bacteria(1.0000), p: Firmicutes(0.8800), c: Clostridia(0.7480), | 4786 |
| | | | | | o: Clostridiales(0.6358), f: Ruminococcaceae(0.5150), g: Ruminococcus(0.3708), | |
| | | | | | s: Ruminococcus_{—}flavefaciens(0.2225) | |
| Ascusb_552A | 202203087 | Ascusb_552 | 98.2 | 0.64524 | d: Bacteria(1.0000), p: Firmicutes(0.9300), c: Clostridia(0.8277), | 4787 |
| | | | | | o: Clostridiales(0.7367), f: Lachnospiraceae(0.6041), g: Clostridium_XIVa(0.2899), | |
| | | | | | s: Clostridium_{—}bolteae(0.0870) | |
| Ascusb_11494B | 202203087 | Ascusb_11494 | 97.8 | 0.47549 | d: Bacteria(1.0000), p: “Bacteroidetes”(1.0000), c: “Bacteroidia”(1.0000), | 4788 |
| | | | | | o: “Bacteroidales”(1.0000), f: “Prevotellaceae”(0.8000), g: Prevotella(0.6240), | |
| | | | | | s: Prevotella_{—}ruminicola(0.4368) | |
| Ascusb_12803B | 202203087 | Ascusb_12803 | 97.3 | 0.58052 | d: Bacteria(1.0000), p: “Bacteroidetes”(1.0000), c: “Bacteroidia”(1.0000), | 4789 |
| | | | | | o: “Bacteroidales”(1.0000), f: “Prevotellaceae”(0.8200), g: Prevotella(0.6478), | |
| | | | | | s: Prevotella_{—}ruminicola(0.4599) | |
| Ascusb_5156B | 202203087 | Ascusb_5156 | 99.1 | 0.52634 | d: Bacteria(1.0000), p: “Bacteroidetes”(0.8500), c: “Bacteroidia”(0.3060), | 4790 |
| | | | | | o: “Bacteroidales”(0.1102), f: “Rikenellaceae”(0.0154), g: Anaerocella(0.0015), | |
| | | | | | s: Anaerocella_{—}delicata(0.0002) | |
| Ascusb_5179B | 202203087 | Ascusb_5179 | 98.7 | 0.5095 | d: Bacteria(1.0000), p: “Bacteroidetes”(1.0000), c: “Bacteroidia”(1.0000), | 4791 |
| | | | | | o: “Bacteroidales”(1.0000), f: “Prevotellaceae”(08000), g: Prevotella(0.6400), | |
| | | | | | s: Prevotella_{—}brevis(0.4416) | |
| Ascusb_13706B | 202203087 | Ascusb_13706 | 97.8 | 0.61421 | d: Bacteria(1.0000), p: Firmicutes(0.8400), c: Clostridia(0.5460), | 4792 |
| | | | | | o: Clostridiales(0.3549), f: Ruminococcaceae(0.1987), g: Hydrogenoanaerobacterium(0.0696), | |
| | | | | | s: Hydrogenoanaerobacterium_{—}saccharovorans(0.0243) | |
| Ascusb_431A | 202203087 | Ascusb_431 | 97.8 | 0.65671 | d: Bacteria(1.0000), p: Firmicutes(0.8500), c: Clostridia(0.5185), | 4793 |
| | | | | | o: Clostridiales(0.3163), f: Ruminococcaceae(0.1487), g: Butyricicoccus(0.0297), | |
| | | | | | s: Butyricicoccus_{—}pullicaecorum(0.0059) | |
| Ascusb_624B | 202203087 | Ascusb_624 | 98.2 | 0.49203 | d: Bacteria(1.0000), p: “Bacteroidetes”(1.0000), c: “Bacteroidia”(1.0000), | 4794 |
| | | | | | o: “Bacteroidales”(1.0000), f: “Prevotellaceae”(0.9500), g: Prevotella(0.9025), | |
| | | | | | s: Prevotella_{—}brevis(0.7220) | |
| Ascusb_4846B | 202203087 | Ascusb_4846 | 99.6 | 0.59965 | d: Bacteria(1.0000), p: “Spirochaetes”(0.9000), c: Spirochaetia(0.8100), | 4795 |
| | | | | | o: Spirochaetales(0.7290), f: Spirochaetaceae(0.6561), g: Treponema(0.5708), | |
| | | | | | s: Treponema_{—}bryantii(0.2454) | |
| Ascusb_2434B | 202203087 | Ascusb_2434 | 98.7 | 0.55815 | d: Bacteria(1.0000), p: “Bacteroidetes”(0.9900), c: “Bacteroidia”(0.9801), | 4796 |
| | | | | | o: “Bacteroidales”(0.9703), f: “Prevotellaceae”(0.7859), g: Prevotella(0.6366), | |
| | | | | | s: Prevotella_{—}ruminicola(0.3247) | |
| Ascusb_3663B | 202203087 | Ascusb_3663 | 97.8 | 0.63822 | d: Bacteria(1.0000), p: “Bacteroidetes”(1.0000), c: “Bacteroidia”(1.0000), | 4797 |
| | | | | | o: “Bacteroidales”(1.0000), f: “Prevotellaceae”(08600), g: Prevotella(0.7396), | |
| | | | | | s: Prevotella_{—}ruminicola(0.5251) | |
| Ascusb_6751A | 202203087 | Ascusb_6751 | 99.6 | 0.57768 | d: Bacteria(1.0000), p: “Spirochaetes”(1.0000), c: Spirochaetia(1.0000), | 4798 |
| | | | | | o: Spirochaetales(1.0000), f: Spirochaetaceae(1.0000), g: Treponema(1.0000), | |
| | | | | | s: Treponema_{—}bryantii(1.0000) | |
| Ascusb_16970A | 202203087 | Ascusb_16970 | 99.6 | 0.51653 | d: Bacteria(1.0000), p: “Spirochaetes”(1.0000), c: Spirochaetia(1.0000), | 4799 |
| | | | | | o: Spirochaetales(1.0000), f: Spirochaetaceae(1.0000), g: Treponema(1.0000), | |
| | | | | | s: Treponema_{—}bryantii(1.0000) | |
| Ascusb_5611A | 202203087 | Ascusb_5611 | 99.1 | 0.59333 | d: Bacteria(1.0000), p: “Spirochaetes”(1.0000), c: Spirochaetia(1.0000), | 4800 |
| | | | | | o: Spirochaetales(1.0000), f: Spirochaetaceae(1.0000), g: Treponema(1.0000), | |
| | | | | | s: Treponema_{—}bryantii(1.0000) | |
| Ascusb_1224A | 202203087 | Ascusb_1224 | 100 | 0.61668 | d: Bacteria(1.0000), p: Firmicutes(0.9800), c: Clostridia(0.9604), | 4801 |
| | | | | | o: Clostridiales(0.9412), f: Lachnospiraceae(0.8188), g: Clostridium_XIVa(0.3930), | |
| | | | | | s: Clostridium_{—}xylanovorans(0.1494) | |
| Ascusb_1372A | 202203087 | Ascusb_1372 | 97.3 | 0.60172 | d: Bacteria(1.0000), p: “Synergistetes”(0.1500), c: Synergistia(0.0225), | 4802 |
| | | | | | o: Synergistales(0.0034), f: Synergistaceae(0.0005), g: Aminiphilus(0.0001), | |
| | | | | | s: Aminiphilus_{—}circumscriptus(0.0000) | |
| Ascusb_64B | 202203087 | Ascusb_64 | 99.1 | 0.89567 | d: Bacteria(1.0000), p: Firmicutes(0.9300), c: Clostridia(0.7998), | 4803 |
| | | | | | o: Clostridiales(0.6878), f: Ruminococcaceae(0.4471), g: Clostridium(_IV0.2146), | |
| | | | | | s: Clostridiumleptum(0.0837) | |
| Ascusb_19281A | 202203087 | Ascusb_19281 | 99.6 | 0.65842 | d: Bacteria(1.0000), p: “Bacteroidetes”(1.0000), c: “Bacteroidia”(1.0000), | 4804 |
| | | | | | o: “Bacteroidales”(1.0000), f: “Prevotellaceae”(0.9400), g: Prevotella(0.8648), | |
| | | | | | s: Prevotella_{—}bryantii(0.3978) | |
| Ascusb_957A | 202203087 | Ascusb_957 | 97.3 | 0.60721 | d: Bacteria(1.0000), p: “Spirochaetes”(1.0000), c: Spirochaetia(1.0000), | 4805 |
| | | | | | o: Spirochaetales(1.0000), f: Spirochaetaceae(1.0000), g: Treponema(1.0000), | |
| | | | | | s: Treponema_{—}bryantii(0.9900) | |
| Ascusb_1665A | 202203087 | Ascusb_1665 | 100 | 0.58014 | d: Bacteria(1.0000), p: “Bacteroidetes”(0.9300), c: Flavobacteriia(0.4278), | 4806 |
| | | | | | o: “Flavobacteriales”(0.1968), f: Flavobacteriaceae(0.0767), g: Salinimicrobium(0.0077), | |
| | | | | | s: Salinimicrobium_{—}marinum(0.0007) | |
| Ascusb_761A | 202203087 | Ascusb_761 | 99.6 | 0.60868 | d: Bacteria(1.0000), p: “Synergistetes”(0.1800), c: Synergistia(0.0324), | 4807 |
| | | | | | o: Synergistales(0.0058), f: Synergistaceae(0.0010), g: Aminiphilus(0.0002), | |
| | | | | | s: Aminiphilus_{—}circumscriptus(0.0000) | |
| Ascusb_2047A | 202203087 | Ascusb_2047 | 97.8 | 0.62245 | d: Bacteria(1.0000), p: “Synergistetes”(0.2200), c: Synergistia(0.0484), | 4808 |
| | | | | | o: Synergistales(0.0106), f: Synergistaceae(0.0023), g: Aminiphilus(0.0005), | |
| | | | | | s: Aminiphilus_{—}circumscriptus(0.0001) | |
| Ascusb_4463A | 202203087 | Ascusb_4463 | 98.2 | 0.57538 | d: Bacteria(1.0000), p: “Bacteroidetes”(0.9800), c: “Bacteroidia”(0.4018), | 4809 |
| | | | | | o: “Bacteroidales”(0.1647), f: “Porphyromonadaceae”(0.0445), g: Barnesiella(0.0089), | |
| | | | | | s: Barnesiella_{—}viscericola(0.0018) | |
| Ascusb_1119A | 202203087 | Ascusb_1119 | 100 | 0.62495 | d: Bacteria(1.0000), p: “Proteobacteria”(0.9300), c: Alphaproteobacteria(0.7998), | 4810 |
| | | | | | o: Sphingomonadales(0.2079), f: Erythrobacteraceae(0.0146), g: Porphyrobacter(0.0010), | |
| | | | | | s: Porphyrobacter_{—}sanguineus(0.0001) | |
| Ascusb_2137A | 202203087 | Ascusb_2137 | 98.2 | 0.80717 | d: Bacteria(1.0000), p: “Bacteroidetes”(0.7300), c: Sphingobacteriia(0.1606), | 4811 |
| | | | | | o: “Sphingobacteriales”(0.0353), f: Chitinophagaceae(0.0053), g: Chitinophaga(0.0004), | |
| | | | | | s: Chitinophaga_{—}eiseniae(0.0000) | |
| Ascusb_8619A | 202203087 | Ascusb_8619 | 98.7 | 0.47372 | d: Bacteria(1.0000), p: “Spirochaetes”(0.9000), c: Spirochaetia(0.8100), | 4812 |
| | | | | | o: Spirochaetales(0.7290), f: Spirochaetaceae(0.6561), g: Treponema(0.5839), | |
| | | | | | s: Treponema_{—}bryantii(0.3095) | |
| Ascusb_383B | 202203087 | Ascusb_383 | 97.3 | 0.46569 | d: Bacteria(1.0000), p: “Bacteroidetes”(1.0000), c: “Bacteroidia”(1.0000), | 4813 |
| | | | | | o: “Bacteroidales”(1.0000), f: “Prevotellaceae”(0.9900), g: Prevotella(0.9801), | |
| | | | | | s: Prevotellabrevis(0.9703) | |
| Ascusb_341A | 202203087 | Ascusb_341 | 97.3 | 0.88077 | d: Bacteria(1.0000), p: Candidatus_Saccharibacteria(0.9800), | 4814 |
| | | | | | g: Saccharibacteria_{—}genera_{—}incertae_{—}sedis(0.9604) | |
| Ascusb_15152A | 202203087 | Ascusb_15152 | 99.1 | 0.45406 | d: Bacteria(1.0000), p: Firmicutes(0.9900), c: Negativicutes(0.9603), | 4815 |
| | | | | | o: Selenomonadales(0.9315), f: Acidaminococcaceae(0.9035), g: Succiniclasticum(0.8674), | |
| | | | | | s: Succiniclasticum_{—}ruminis(0.8327) | |
| Ascusb_20167A | 202203087 | Ascusb_20167 | 99.6 | 0.51035 | d: Bacteria(1.0000), p: “Bacteroidetes”(1.0000), c: “Bacteroidia”(1.0000), | 4816 |
| | | | | | o: “Bacteroidales”(1.0000), f: “Prevotellaceae”(0.9200), g: Prevotella(0.8280), | |
| | | | | | s: Prevotella_{—}bryantii(0.3478) | |
| Ascusb_20150A | 202203087 | Ascusb_20150 | 99.1 | 0.76844 | d: Bacteria(1.0000), p: “Proteobacteria”(0.2600), c: Gammaproteobacteria(0.0468), | 4817 |
| | | | | | o: Thiotrichales(0.0051), f: Piscirickettsiaceae(0.0006), g: Sulfurivirga(0.0001), | |
| | | | | | s: Sulfurivirga_{—}caldicuralii(0.0000) | |
| Ascusb_1125A | 202203087 | Ascusb_1125 | 99.6 | 0.66122 | d: Bacteria(1.0000), p: “Bacteroidetes”(1.0000), c: “Bacteroidia”(1.0000), | 4818 |
| | | | | | o: “Bacteroidales”(1.0000), f: “Prevotellaceae”(0.9300), g: Prevotella(0.8463), | |
| | | | | | s: Prevotella_{—}bryantii(0.3808) | |
| Ascusb_14943A | 202203087 | Ascusb_14943 | 99.6 | 0.65057 | d: Bacteria(1.0000), p: “Bacteroidetes”(1.0000), c: “Bacteroidia”(1.0000), | 4819 |
| | | | | | o: “Bacteroidales”(1.0000), f: “Prevotellaceae”(0.9200), g: Prevotella(0.8188), | |
| | | | | | s: Prevotella_{—}bryantii(0.3685) | |
| Ascusb_19296A | 202203087 | Ascusb_19296 | 99. | 0.71794 | d: Bacteria(1.0000), p: “Bacteroidetes”(1.0000), c: “Bacteroidia”(1.0000), | 4820 |
| | | | | | o: “Bacteroidales”(1.0000), f: “Prevotellaceae”(0.9500), g: Prevotella(0.9025), | |
| | | | | | s: Prevotella_{—}bryantii(0.4422) | |
| Ascusb_310B | 202203087 | Ascusb_310 | 100 | 0.51086 | d: Bacteria(1.0000), p: “Bacteroidetes”(1.0000), c: “Bacteroidia”(1.0000), | 4821 |
| | | | | | o: “Bacteroidales”(1.0000), f: “Prevotellaceae”(0.9900), g: Prevotella(0.9801), | |
| | | | | | s: Prevotella_{—}ruminicola(0.7841) | |
| Ascusb_2633B | 202203087 | Ascusb_2633 | 100 | 0.59178 | d: Bacteria(1.0000), p: “Bacteroidetes”(1.0000), c: “Bacteroidia”(1.0000), | 4822 |
| | | | | | o: “Bacteroidales”(1.0000), f: “Prevotellaceae”(0.8500), g: Prevotella(0.7225), | |
| | | | | | s: Prevotella_{—}brevis(0.4407) | |
| Ascusb_8244B | 202203087 | Ascusb_8244 | 99.6 | 0.51073 | d: Bacteria(1.0000), p: “Bacteroidetes”(1.0000), c: “Bacteroidia”(0.9900), | 4823 |
| | | | | | o: “Bacteroidales”(0.9801), f: “Prevotellaceae”(0.8233), g: Prevotella(0.6916), | |
| | | | | | s: Prevotella_{—}brevis(0.4357) | |
| Ascusb_83B | 202203087 | Ascusb_83 | 99.6 | 0.5568 | d: Bacteria(1.0000), p: “Bacteroidetes”(1.0000), c: “Bacteroidia”(1.0000), | 4824 |
| | | | | | o: “Bacteroidales”(1.0000), f: “Prevotellaceae”(08100), g: Prevotella(0.6561), | |
| | | | | | s: Prevotella_{—}brevis(0.4133) | |
| Ascusb_2590C | 202203087 | Ascusb_2590 | 98.2 | 0.60511 | d: Bacteria(1.0000), p: “Bacteroidetes”(1.0000), c: “Bacteroidia”(0.9900), | 4825 |
| | | | | | o: “Bacteroidales”(0.9801), f: Bacteroidaceae(0.9703), g: Bacteroides(0.9606), | |
| | | | | | s: Bacteroides_{—}coprocola(0.6244) | |
| Ascusb_2670A | 202203087 | Ascusb_2670 | 98.2 | 0.70673 | d: Bacteria(1.0000), p: “Spirochaetes”(1.0000), c: Spirochaetia(1.0000), | 4826 |
| | | | | | o: Spirochaetales(1.0000), f: Spirochaetaceae(1.0000), g: Treponema(1.0000), | |
| | | | | | s: Treponema_{—}bryantii(1.0000) | |
| Ascusb_4366A | 202203087 | Ascusb_4366 | 97.8 | 0.51373 | d: Bacteria(1.0000), p: “Spirochaetes”(1.0000), c: Spirochaetia(1.0000), | 4827 |
| | | | | | o: Spirochaetales(1.0000), f: Spirochaetaceae(1.0000), g: Treponema(1.0000), | |
| | | | | | s: Treponema_{—}bryantii(1.0000) | |
| Ascusb_126B | 202203087 | Ascusb_126 | 99.1 | 0.92772 | d: Bacteria(1.0000), p: Firmicutes(0.7000), c: Clostridia(0.4760), | 4828 |
| | | | | | o: Clostridiales(0.3237), f: Ruminococcaceae(0.1521), g: Hydrogenoanaerobacterium(0.0289), | |
| | | | | | s: Hydrogenoanaerobacterium_{—}saccharovorans(0.0055) | |
| Ascusb_21056A | 202203087 | Ascusb_21056 | 98.7 | 0.66044 | d: Bacteria(1.0000), p: Firmicutes(0.5100), c: Clostridia(0.2295), | 4829 |
| | | | | | o: Clostridiales(0.1033), f: Ruminococcaceae(0.0155), g: Hydrogenoanaerobacterium(0.0019), | |
| | | | | | s: Hydrogenoanaerobacterium_{—}saccharovorans(0.0002) | |
| Ascusb_4947A | 202203087 | Ascusb_4947 | 99.1 | 0.63081 | d: Bacteria(1.0000), p: “Synergistetes”(0.1700), c: Synergistia(0.0289), | 4830 |
| | | | | | o: Synergistales(0.0049), f: Synergistaceae(0.0008), g: Aminiphilus(0.0001), | |
| | | | | | s: Aminiphilus_{—}circumscriptus(0.0000) | |
| Ascusb_14287A | 202203087 | Ascusb_14287 | 99.1 | 0.54556 | d: Bacteria(1.0000), p: “Synergistetes”(0.1800), c: Synergistia(0.0324), | 4831 |
| | | | | | o: Synergistales(0.0058), f: Synergistaceae(0.0010), g: Aminiphilus(0.0002), | |
| | | | | | s: Aminiphilus_{—}circumscriptus(0.0000) | |
| Ascusb_3313A | 202203087 | Ascusb_3313 | 99.6 | 0.57425 | d: Bacteria(1.0000), p: “Synergistetes”(0.1200), c: Synergistia(0.0144), | 4832 |
| | | | | | o: Synergistales(0.0017), f: Synergistaceae(0.0002), g: Aminiphilus(0.0000), | |
| | | | | | s: Aminiphilus_{—}circumscriptus(0.0000) | |
| Ascusb_7687A | 202203087 | Ascusb_7687 | 100 | 0.47666 | d: Bacteria(1.0000), p: “Bacteroidetes”(0.8900), c: “Bacteroidia”(0.4183), | 4833 |
| | | | | | o: “Bacteroidales”(0.1966), f: “Porphyromonadaceae”(0.0550), g: Barnesiella(0.0061), | |
| | | | | | s: Barnesiella_{—}viscericola(0.0007) | |
| Ascusb_1068B | 202203087 | Ascusb_1068 | 98.2 | 0.46566 | d: Bacteria(1.0000), p: “Bacteroidetes”(0.8100), c: Sphingobacteriia(0.2187), | 4834 |
| | | | | | o: “Sphingobacteriales”(0.0590), f: Chitinophagaceae(0.0124), g: Chitinophaga(0.0011), | |
| | | | | | s: Chitinophaga_{—}gingshengii(0.0001) | |
| Ascusb_2103A | 202203087 | Ascusb_2103 | 97.4 | 0.55354 | d: Bacteria(1.0000), p: “Bacteroidetes”(0.8500), c: “Bacteroidia”(0.3485), | 4835 |
| | | | | | o: “Bacteroidales”(0.1429), f: “Rikenellaceae”(0.0143), g: Alistipes(0.0011), | |
| | | | | | s: Alistipes_{—}putredinis(0.0001) | |
| Ascusb_5315B | 202203087 | Ascusb_5315 | 99.1 | 0.60302 | d: Bacteria(1.0000), p: “Bacteroidetes”(1.0000), c: “Bacteroidia”(1.0000), | 4836 |
| | | | | | o: “Bacteroidales”(1.0000), f: “Prevotellaceae”(0.9700), g: Prevotella(0.9409), | |
| | | | | | s: Prevotella_{—}ruminicola(0.8468) | |
| Ascusb_676A | 202203087 | Ascusb_676 | 97.8 | 0.70158 | d: Bacteria(1.0000), p: Firmicutes(0.8400), c: Clostridia(0.6384), | 4837 |
| | | | | | o: Clostridiales(0.4852), f: Ruminococcaceae(0.2086), g: Hydrogenoanaerobacterium(0.0542), | |
| | | | | | s: Hydrogenoanaerobacterium_{—}saccharovorans(0.0141) | |
| Ascusb_9441A | 202203087 | Ascusb_9441 | 97.8 | 0.5647 | d: Bacteria(1.0000), p: “Bacteroidetes”(0.8000), c: “Bacteroidia”(0.4800), | 4838 |
| | | | | | o: “Bacteroidales”(0.2880), f: “Porphyromonadaceae”(0.1440), g: Proteiniphilum(0.0317), | |
| | | | | | s: Proteiniphilum_{—}acetatigenes(0.0070) | |
| Ascusb_2792B | 202203087 | Ascusb_2792 | 98.7 | 0.66136 | d: Bacteria(1.0000), p: Firmicutes(0.8400), c: Erysipelotrichia(0.3024), | 4839 |
| | | | | | o: Erysipelotrichales(0.1089), f: Erysipelotrichaceae(0.0392), g: Turicibacter(0.0086), | |
| | | | | | s: Turicibacter_{—}sanguinis(0.0019) | |
| Ascusb_251A | 202203087 | Ascusb_251 | 100 | 0.71767 | d: Bacteria(1.0000), p: Firmicutes(0.8800), c: Bacilli(0.7480), | 4840 |
| | | | | | o: Lactobacillobacillaceae(0.0503), g: Lactobacillus(0.0121), | |
| | | | | | s: Lactobacillus_{—}delbrueckii_subsp._sunkii(0.0011) | |
| Ascusb_6655B | 202203087 | Ascusb_6655 | 99.1 | 0.6082 | d: Bacteria(1.0000), p: Cyanobacteria/Chloroplast(0.2600), c: Chloroplast(0.0416), | 4841 |
| | | | | | f: Chloroplast(0.0067), g: Streptophyta(0.0010) | |
| Ascusb_20912A | 202203087 | Ascusb_20912 | 100 | 0.8243 | d: Bacteria(1.0000), p: Firmicutes(0.9300), c: Clostridia(0.8091), | 4842 |
| | | | | | o: Clostridiales(0.6958), f: Ruminococcaceae(0.2575), g: Clostridium_IV(0.0592), | |
| | | | | | s: Clostridium_{—}leptum(0.0124) | |
| Ascusb_1536A | 202203087 | Ascusb_1536 | 99.6 | 0.54341 | d: Bacteria(1.0000), p: Firmicutes(0.6200), c: Clostridia(0.3534), | 4843 |
| | | | | | o: Clostridiales(0.1979), f: Ruminococcaceae(0.0594), g: Ruminococcus(0.0178), | |
| | | | | | s: Ruminococcus_{—}callidus(0.0039) | |
| Ascusb_1244B | 202203087 | Ascusb_1244 | 99.6 | 0.70499 | d: Bacteria(1.0000), p: “Spirochaetes”(1.0000), c: Spirochaetia(1.0000), | 4844 |
| | | | | | o: Spirochaetales(1.0000), f: Spirochaetaceae(1.0000), g: Treponema(1.0000), | |
| | | | | | s: Treponema_{—}bryantii(1.0000) | |
| Ascusb_987A | 202203087 | Ascusb_987 | 97.3 | 0.64514 | d: Bacteria(1.0000), p: “Bacteroidetes”(0.7800), c: “Bacteroidia”(0.4602), | 4845 |
| | | | | | o: “Bacteroidales”(0.2715), f: “Rikenellaceae”(0.0842), g: Alistipes(0.0160), | |
| | | | | | s: Alistipes_{—}shahii(0.0021) | |
| Ascusb_2845A | 202203087 | Ascusb_2845 | 99.1 | 0.57489 | d: Bacteria(1.0000), p: Firmicutes(0.8200), c: Clostridia(0.6314), | 4846 |
| | | | | | o: Clostridiales(0.4799), f: Christensenellaceae(0.1440), g: Christensenella(0.0432), | |
| | | | | | s: Christensenella_{—}minuta(0.0130) | |
| Ascusb_7519A | 202203087 | Ascusb_7519 | 97.8 | 0.53222 | d: Bacteria(1.0000), p: Firmicutes(0.8100), c: Clostridia(0.6075), | 4847 |
| | | | | | o: Clostridiales(0.4496), f: Christensenellaceae(0.1214), g: Christensenella(0.0328), | |
| | | | | | s: Christensenella_{—}minuta(0.0088) | |
| Ascusb_2686A | 202203087 | Ascusb_2686 | 99.1 | 0.60552 | d: Bacteria(1.0000), p: “Bacteroidetes”(0.9400), c: “Bacteroidia”(0.6768), | 4848 |
| | | | | | o: “Bacteroidales”(0.4873), f: “Porphyromonadaceae”(0.1267), g: b_{—}sgonomonas(0.0152), | |
| | | | | | s: b_{—}sgonomonastermitidis(0.0017) | |
| Ascusb_2786A | 202203087 | Ascusb_2786 | 98.2 | 0.6298 | d: Bacteria(1.0000), p: “Bacteroidetes”(0.9400), c: Flavobacteriia(0.5264), | 4849 |
| | | | | | o: “Flavobacteriales”(0.2948), f: Flavobacteriaceae(0.1474), g: Lutibacter(0.0147), | |
| | | | | | s: Lutibacter_{—}flavus(0.0015) | |
| Ascusb_2254A | 202203087 | Ascusb_2254 | 97.3 | 0.55533 | d: Bacteria(1.0000), p: “Bacteroidetes”(0.9300), c: “Bacteroidia”(0.2418), | 4850 |
| | | | | | o: “Bacteroidales”(0.0629), f: “Porphyromonadaceae”(0.0101), g: Barnesiella(0.0009), | |
| | | | | | s: Barnesiella_{—}viscericola(0.0001) | |
| Ascusb_688B | 202203087 | Ascusb_688 | 98.2 | 0.66709 | d: Bacteria(1.0000), p: “Bacteroidetes”(1.0000), c: “Bacteroidia”(0.9800), | 4851 |
| | | | | | o: “Bacteroidales”(0.9604), f: “Prevotellaceae”(0.8932), g: Prevotella(0.8306), | |
| | | | | | s: Prevotella_{—}ruminicola(0.6479) | |
| Ascusb_3276A | 202203087 | Ascusb_3276 | 99.6 | 0.52989 | d: Bacteria(1.0000), p: “Bacteroidetes”(0.9900), c: “Bacteroidia”(0.9603), | 4852 |
| | | | | | o: “Bacteroidales”(0.9315), f: Bacteroidaceae(0.8663), g: Bacteroides(0.8056), | |
| | | | | | s: Bacteroides_{—}uniformis(0.2014) | |
| Ascusb_3689B | 202203087 | Ascusb_3689 | 99.6 | 0.48308 | d: Bacteria(1.0000), p: “Bacteroidetes”(0.8700), c: Flavobacteriia(0.2001), | 4853 |
| | | | | | o: “Flavobacteriales”(0.0460), f: Flavobacteriaceae(0.0097), g: Lutibacter(0.0009), | |
| | | | | | s: Lutibacter_{—}flavus(0.0001) | |
| Ascusb_321A | 202203087 | Ascusb_321 | 100 | 0.67271 | d: Bacteria(1.0000), p: “Bacteroidetes”(1.0000), c: “Bacteroidia”(1.0000), | 4854 |
| | | | | | o: “Bacteroidales”(1.0000), f: “Prevotellaceae”(0.9400), g: Prevotella(0.8836), | |
| | | | | | s: Prevotella_{—}ruminicola(0.6892) | |
| Ascusb_16972A | 202203087 | Ascusb_16972 | 98.7 | 0.54099 | d: Bacteria(1.0000), p: “Tenericutes”(0.3300), c: Mollicutes(01089), | 4855 |
| | | | | | o: Entomoplasmatales(0.0272), f: Spiroplasmataceae(0.0068), g: Spiroplasma(0.0017), | |
| | | | | | s: Spiroplasma_{—}gladiatoris(0.0001) | |
| Ascusb_11080A | 202203087 | Ascusb_11080 | 97.3 | 0.58682 | d: Bacteria(1.0000), p: “Tenericutes”(0.3200), c: Mollicutes(0.1024), | 4856 |
| | | | | | o: Entomoplasmatales(0.0276), f: Spiroplasmataceae(0.0072), g: Spiroplasma(0.0019), | |
| | | | | | s: Spiroplasma_{—}culicicola(0.0001) | |
| Ascusb_1794B | 202203087 | Ascusb_1794 | 99.6 | 0.80012 | d: Bacteria(1.0000), p: “Bacteroidetes”(0.8600), c: Sphingobacteriia(0.2752), | 4857 |
| | | | | | o: “Sphingobacteriales”(0.0881), f: Chitinophagaceae(0.0247), g: Chitinophaga(0.0064), | |
| | | | | | s: Chitinophaga_{—}qingshengii(0.0015) | |
| Ascusb_51B | 202203087 | Ascusb_51 | 99.1 | 0.90565 | d: Bacteria(1.0000), p: “Bacteroidetes”(1.0000), c: “Bacteroidia”(0.9900), | 4858 |
| | | | | | o: “Bacteroidales”(0.9801), f: “Prevotellaceae”(0.9017), g: Prevotella(0.8115), | |
| | | | | | s: Prevotella_{—}bryantii(0.3246) | |
| Ascusb_5859A | 202203087 | Ascusb_5859 | 100 | 0.44955 | d: Bacteria(1.0000), p: “Bacteroidetes”(1.0000), c: “Bacteroidia”(0.9800), | 4859 |
| | | | | | o: “Bacteroidales”(0.9604), f: “Prevotellaceae”(0.9220), g: Prevotella(0.8759), | |
| | | | | | s: Prevotella_{—}brevis(0.5168) | |
| Ascusb_3978A | 202203087 | Ascusb_3978 | 98.7 | 0.44842 | d: Bacteria(1.0000), p: “Bacteroidetes”(0.9300), c: “Bacteroidia”(0.3999), | 4860 |
| | | | | | o: “Bacteroidales”(0.1720), f: “Porphyromonadaceae”(0.0516), g: Barnesiella(0.0119), | |
| | | | | | s: Barnesiella_{—}viscericola(0.0027) | |
| Ascusb_917A | 202203087 | Ascusb_917 | 99.6 | 0.61858 | d: Bacteria(1.0000), p: Firmicutes(0.6100), c: Clostridia(0.1525), | 4861 |
| | | | | | o: Clostridiales(0.0381), f: Lachnospiraceae(0.0084), g: Lachnospiracea_{—}incertae_{—}sedis(0.0010), | |
| | | | | | s: Eubacterium_{—}ventriosum(0.0001) | |
| Ascusb_4364A | 202203087 | Ascusb_4364 | 97.3 | 0.58215 | d: Bacteria(1.0000), p: Firmicutes(0.8700), c: Clostridia(0.6525), | 4862 |
| | | | | | o: Clostridiales(0.4306), f: Lachnospiraceae(0.0603), g: Ruminococcus2(0.0048), | |
| | | | | | s: Ruminococcus_{—}torques(0.0004) | |
| Ascusb_1906A | 202203087 | Ascusb_1906 | 100 | 0.54119 | d: Bacteria(1.0000), p: “Tenericutes”(0.8400), c: Mollicutes(0.7056), | 4863 |
| | | | | | o: Anaeroplasmatales(0.5715), f: Anaeroplasmataceae(0.4629), g: Anaeroplasma(0.3750), | |
| | | | | | s: Anaeroplasma_{—}abactoclasticum(0.2100) | |
| Ascusb_4840A | 202203087 | Ascusb_4840 | 99.1 | 0.47849 | d: Bacteria(1.0000), p: “Bacteroidetes”(1.0000), c: “Bacteroidia”(0.9600), | 4864 |
| | | | | | o: “Bacteroidales”(0.9216), f: Bacteroidaceae(0.8663), g: Bacteroides(0.8143), | |
| | | | | | s: Bacteroides_{—}coprocola(0.3013) | |
| Ascusb_351A | 202203087 | Ascusb_351 | 99.1 | 0.48132 | d: Bacteria(1.0000), p: “Bacteroidetes”(1.0000), c: “Bacteroidia”(0.9900), | 4865 |
| | | | | | o: “Bacteroidales”(0.9801), f: “Prevotellaceae”(0.9115), g: Prevotella(0.8477), | |
| | | | | | s: Prevotella_{—}ruminicola(0.5934) | |
| Ascusb_13271B | 202203087 | Ascusb_13271 | 98.7 | 0.83405 | d: Bacteria(1.0000), p: Firmicutes(0.8800), c: Clostridia(0.6864), | 4866 |
| | | | | | o: Clostridiales(0.5217), f: Lachnospiraceae(0.1930), g: Roseburia(0.0386), | |
| | | | | | s: Roseburia_{—}hominis(0.0050) | |
| Ascusb_2612B | 202203087 | Ascusb_2612 | 98.2 | 0.54579 | d: Bacteria(1.0000), p: “Tenericutes”(1.0000), c: Mollicutes(1.0000), | 4867 |
| | | | | | o: Anaeroplasmatales(1.0000), f: Anaeroplasmataceae(1.0000), g: Anaeroplasma(1.0000), | |
| | | | | | s: Anaeroplasma_{—}bactoclasticum(0.6200) | |
| Ascusb_2541B | 202203087 | Ascusb_2541 | 99.6 | 0.58917 | d: Bacteria(1.0000), p: Firmicutes(0.7100), c: Erysipelotrichia(0.1633), | 4868 |
| | | | | | o: Erysipelotrichales(0.0376), f: Erysipelotrichaceae(0.0086), g: Turicibacter(0.0015), | |
| | | | | | s: Turicibacter_{—}sanguinis(0.0002) | |
| Ascusb_4150A | 202203087 | Ascusb_4150 | 97.3 | 0.44375 | d: Bacteria(1.0000), p: “Proteobacteria”(0.5100), c: Epsilonproteobacteria(0.0765), | 4869 |
| | | | | | o: Campylobacterales(0.0115), f: Campylobacteraceae(0.0015), g: Sulfurospirillum(0.0001), | |
| | | | | | s: Sulfurospirillum_{—}barnesii(0.0000) | |
| Ascusb_5667A | 202203087 | Ascusb_5667 | 99.6 | 0.46768 | d: Bacteria(1.0000), p: “Bacteroidetes”(0.3200), c: “Bacteroidia”(0.1024), | 4870 |
| | | | | | o: “Bacteroidales”(0.0328), f: Bacteroidaceae(0.0105), g: Anaerorhabdus(0.0034), | |
| | | | | | s: Anaerorhabdus_{—}furcosa(0.0011) | |
| Ascusb_2173A | 202203087 | Ascusb_2173 | 99.1 | 0.58729 | d: Bacteria(1.0000), p: Firmicutes(0.8500), c: Clostridia(0.4080), | 4871 |
| | | | | | o: Clostridiales(0.1877), f: Heliobacteriaceae(0.0319), g: Heliorestis(0.0045), | |
| | | | | | s: Heliorestis_{—}daurensis(0.0006) | |
| Ascusb_108A | 202203087 | Ascusb_108 | 99.1 | 0.75915 | d: Bacteria(1.0000), p: Firmicutes(0.9600), c: Clostridia(0.9216), | 4872 |
| | | | | | o: Clostridiales(0.8847), f: Lachnospiraceae(0.8493), g: Shuttleworthia(0.1359), | |
| | | | | | s: Shuttleworthia_{—}satelles(0.0217) | |
| Ascusb_1366A | 202203087 | Ascusb_1366 | 99.6 | 0.89995 | d: Bacteria(1.0000), p: Candidatus_Saccharibacteria(0.7700), | 4873 |
| | | | | | g: Saccharibacteria_{—}genera_{—}incertae_{—}sedis(0.5929) | |
| Ascusb_7156A | 202203087 | Ascusb_7156 | 99.6 | 0.57261 | d: Bacteria(1.0000), p: “Bacteroidetes”(0.9800), c: “Bacteroidia”(0.4312), | 4874 |
| | | | | | o: “Bacteroidales”(0.1897), f: “Porphyromonadaceae”(0.0626), g: Barnesiella(0.0150), | |
| | | | | | s: Barnesiella_{—}viscericola(0.0036) | |
| Ascusb_453B | 202203087 | Ascusb_453 | 100 | 0.43933 | d: Bacteria(1.0000), p: “Bacteroidetes”(0.9900), c: “Bacteroidia”(0.8514), | 4875 |
| | | | | | o: “Bacteroidales”(0.7322), f: “Prevotellaceae”(0.2123), g: Prevotella(0.0595), | |
| | | | | | s: Prevotella_{—}albensis(0.0125) | |
| Ascusb_4270A | 202203087 | Ascusb_4270 | 100 | 0.47226 | d: Bacteria(1.0000), p: “Bacteroidetes”(1.0000), c: “Bacteroidia”(0.9800), | 4876 |
| | | | | | o: “Bacteroidales”(0.9604), f: Bacteroidaceae(0.9220), g: Bacteroides(0.8851), | |
| | | | | | s: Bacteroides_{—}coprocola(0.2301) | |
| Ascusb_2704A | 202203087 | Ascusb_2704 | 97.3 | 0.47972 | d: Bacteria(1.0000), p: “Proteobacteria”(0.9700), c: Deltaproteobacteria(0.1552), | 4877 |
| | | | | | o: Desulfovibrionales(0.0217), f: Desulfovibrionaceae(0.0030), g: Desulfovibrio(0.0004), | |
| | | | | | s: Desulfovibrio_{—}psychrotolerans(0.0000) | |
| Ascusb_4177A | 202203087 | Ascusb_4177 | 100 | 0.60305 | d: Bacteria(1.0000), p: Candidatus_Saccharibacteria(0.8400), | 4878 |
| | | | | | g: Saccharibacteria_{—}genera_{—}incertae_{—}sedis(0.7056) | |
| Ascusb_2710A | 202203087 | Ascusb_2710 | 99.6 | 0.65899 | d: Bacteria(1.0000), p: “Bacteroidetes”(0.9500), c: “Bacteroidia”(0.7220), | 4879 |
| | | | | | o: “Bacteroidales”(0.5487), f: Marinilabiliaceae(0.1482), g: Alkalitalea(0.0163), | |
| | | | | | s: Alkalitalea_{—}saponilacus(0.0018) | |
| Ascusb_5711A | 202203087 | Ascusb_5711 | 97.3 | 0.55693 | d: Bacteria(1.0000), p: “Bacteroidetes”(0.9700), c: “Bacteroidia”(0.7760), | 4880 |
| | | | | | o: “Bacteroidales”(0.6208), f: Marinilabiliaceae(0.2669), g: Alkalitalea(0.0828), | |
| | | | | | s: Alkalitalea_{—}saponilacus(0.0257) | |
| Ascusb_3606B | 202203087 | Ascusb_3606 | 100 | 0.66354 | d: Bacteria(1.0000), p: “Bacteroidetes”(0.9900), c: “Bacteroidia”(0.3762), | 4881 |
| | | | | | o: “Bacteroidales”(0.1430), f: “Rikenellaceae”(0.0315), g: Alistipes(0.0063), | |
| | | | | | s: Alistipes_{—}putredinis(0.0008) | |
| Ascusb_20052B | 202203087 | Ascusb_20052 | 100 | 0.48834 | d: Bacteria(1.0000), p: “Bacteroidetes”(0.9900), c: “Bacteroidia”(0.9702), | 4882 |
| | | | | | o: “Bacteroidales”(0.9508), f: “Prevotellaceae”(0.9128), g: Prevotella(0.8763), | |
| | | | | | s: Prevotella_{—}brevis(0.5871) | |
| Ascusb_17652A | 202203087 | Ascusb_17652 | 100 | 0.85261 | d: Bacteria(1.0000), p: Firmicutes(0.8000), c: Clostridia(0.6320), | 4883 |
| | | | | | o: Clostridiales(0.4930), f: Lachnospiraceae(0.2514), g: Roseburia(0.0905), | |
| | | | | | s: Roseburia_{—}hominis(0.0226) | |
| Ascusb_318A | 202203087 | Ascusb_318 | 100 | 0.74628 | d: Bacteria(1.0000), p: “Tenericutes”(0.6400), c: Mollicutes(0.4096), | 4884 |
| | | | | | o: Anaeroplasmatales(0.2048), f: Anaeroplasmataceae(0.1024), g: Anaeroplasma(0.0512), | |
| | | | | | s: Anaeroplasma_{—}varium(0.0128) | |
| Ascusb_2516A | 202203087 | Ascusb_2516 | 100 | 0.57796 | d: Bacteria(1.0000), p: “Bacteroidetes”(0.9700), c: Flavobacteriia(0.5432), | 4885 |
| | | | | | o: “Flavobacteriales”(0.3042), f: Cryomorphaceae(0.0821), g: Fluviicola(0.0107), | |
| | | | | | s: Fluviicola_{—}taffensis(0.0014) | |
| Ascusb_7077A | 202203087 | Ascusb_7077 | 97.3 | 0.55138 | d: Bacteria(1.0000), p: “Bacteroidetes”(0.7400), c: “Bacteroidia”(0.3034), | 4886 |
| | | | | | o: “Bacteroidales”(0.1244), f: “Porphyromonadaceae”(0.0435), g: Parabacteroides(0.0100), | |
| | | | | | s: Parabacteroides_{—}distasonis(0.0013) | |
| Ascusb_5136B | 202203087 | Ascusb_5136 | 98.7 | 0.72712 | d: Bacteria(1.0000), p: “Bacteroidetes”(0.9700), c: “Bacteroidia”(0.7566), | 4887 |
| | | | | | o: “Bacteroidales”(0.5901), f: “Porphyromonadaceae”(0.3895), g: Coprobacter(0.0467), | |
| | | | | | s: Coprobacter_{—}fastidiosus(0.0056) | |
| Ascusb_156A | 202203087 | Ascusb_156 | 99.6 | 0.53343 | d: Bacteria(1.0000), p: Firmicutes(0.7300), c: Clostridia(0.4964), | 4888 |
| | | | | | o: Clostridiales(0.3376), f: Ruminococcaceae(0.1283), g: Ruminococcus(0.0346), | |
| | | | | | s: Ruminococcus_{—}albus(0.0090) | |
| Ascusb_1101A | 202203087 | Ascusb_1101 | 97.8 | 0.48709 | d: Bacteria(1.0000), p: “Fibrobacteres”(1.0000), c: “Fibrobacteria”(1.0000), | 4889 |
| | | | | | o: “Fibrobacterales”(1.0000), f: “Fibrobacteraceae”(1.0000), g: Fibrobacter(1.0000), | |
| | | | | | s: Fibrobacter_{—}succinogenes_subsp._succinogenes(0.9800) | |
| Ascusb_141A | 202203087 | Ascusb_141 | 99.6 | 0.57563 | d: Bacteria(1.0000), p: Firmicutes(0.9900), c: Clostridia(0.9801), | 4890 |
| | | | | | o: Clostridiales(0.9605), f: Ruminococcaceae(0.9413), g: Ruminococcus(0.8942), | |
| | | | | | s: Ruminococcus_{—}flavefaciens(0.8495) | |
| Ascusb_12866A | 202203087 | Ascusb_12866 | 98.2 | 0.45612 | d: Bacteria(1.0000), p: “Bacteroidetes”(1.0000), c: “Bacteroidia”(0.9800), | 4891 |
| | | | | | o: “Bacteroidales”(0.9604), f: “Prevotellaceae”(0.7779), g: Prevotella(0.6223), | |
| | | | | | s: Prevotella_{—}brevis(0.4294) | |
| Ascusb_1702A | 202203087 | Ascusb_1702 | 97.3 | 0.83684 | d: Bacteria(1.0000), p: “Bacteroidetes”(0.9000), c: “Bacteroidia”(0.6120), | 4892 |
| | | | | | o: “Bacteroidales”(0.4162), f: “Porphyromonadaceae”(0.2039), g: Proteiniphilum(0.0347), | |
| | | | | | s: Proteiniphilum_{—}acetatigenes(0.0059) | |
| Ascusb_1890A | 202203087 | Ascusb_1890 | 99.1 | 0.49041 | d: Bacteria(1.0000), p: Firmicutes(0.8200), c: Bacilli(0.2050), | 4893 |
| | | | | | o: Bacillales(0.0512), f: Paenibacillaceae_1(0.0097), g: Paenibacillus(0.0017), | |
| | | | | | s: Paenibacillus_{—}typhae(0.0001) | |
| Ascusb_13587A | 202203087 | Ascusb_13587 | 100 | 0.46675 | d: Bacteria(1.0000), p: “Tenericutes”(0.2100), c: Mollicutes(0.0441), | 4894 |
| | | | | | o: Entomoplasmatales(0.0075), f: Spiroplasmataceae(0.0013), g: Spiroplasma(0.0002), | |
| | | | | | s: Spiroplasma_{—}platyhelix(0.0000) | |
| Ascusb_20566A | 202203087 | Ascusb_20566 | 97.8 | 0.50162 | d: Bacteria(1.0000), p: “Tenericutes”(0.2600), c: Mollicutes(0.0676), | 4895 |
| | | | | | o: Entomoplasmatales(0.0149), f: Spiroplasmataceae(0.0033), g: Spiroplasma(0.0007), | |
| | | | | | s: Spiroplasma_{—}platyhelix(0.0001) | |
| Ascusb_223A | 202203087 | Ascusb_223 | 99.1 | 0.49 | d: Bacteria(1.0000), p: “Bacteroidetes”(0.9900), c: “Bacteroidia”(0.9801), | 4896 |
| | | | | | o: “Bacteroidales”(0.9703), f: “Prevotellaceae”(0.9606), g: Prevotella(0.9510), | |
| | | | | | s: Prevotella_{—}brevis(0.9415) | |
| Ascusb_198B | 202203087 | Ascusb_198 | 99.1 | 0.54315 | d: Bacteria(1.0000), p: “Bacteroidetes”(1.0000), c: “Bacteroidia”(1.0000), | 4897 |
| | | | | | o: “Bacteroidales”(1.0000), f: “Prevotellaceae”(1.0000), g: Prevotella(1.0000), | |
| | | | | | s: Prevotella_{—}brevis(1.0000) | |
| Ascusb_1661B | 202203087 | Ascusb_1661 | 97.3 | 0.58188 | d: Bacteria(1.0000), p: “Bacteroidetes”(1.0000), c: “Bacteroidia”(1.0000), | 4898 |
| | | | | | o: “Bacteroidales”(1.0000), f: “Prevotellaceae”(0.9900), g: Prevotella(0.9801), | |
| | | | | | s: Prevotella_{—}brevis(0.9507) | |
| Ascusb_300A | 202203087 | Ascusb_300 | 98.7 | 0.71072 | d: Bacteria(1.0000), p: “Fibrobacteres”(1.0000), c: “Fibrobacteria”(1.0000), | 4899 |
| | | | | | o: “Fibrobacterales”(1.0000), f: “Fibrobacteraceae”(1.0000), g: Fibrobacter(1.0000), | |
| | | | | | s: Fibrobacter_{—}succinogenes_subsp._succinogenes(0.9700) | |
| Ascusb_813B | 202203087 | Ascusb_813 | 98.2 | 0.71124 | d: Bacteria(1.0000), p: “Fibrobacteres”(1.0000), c: “Fibrobacteria”(1.0000), | 4900 |
| | | | | | o: “Fibrobacterales”(1.0000), f: “Fibrobacteraceae”(1.0000), g: Fibrobacter(1.0000), | |
| | | | | | s: Fibrobacter_{—}succinogenes_subsp._succinogenes(0.9700) | |
| Ascusb_3757A | 202203087 | Ascusb_3757 | 97.8 | 0.46426 | d: Bacteria(1.0000), p: “Fibrobacteres”(1.0000), c: “Fibrobacteria”(1.0000), | 4901 |
| | | | | | o: “Fibrobacterales”(1.0000), f: “Fibrobacteraceae”(1.0000), g: Fibrobacter(1.0000), | |
| | | | | | s: Fibrobacter_{—}succinogenes_subsp._succinogenes(0.9900) | |
| Ascusb_4971B | 202203087 | Ascusb_4971 | 98.2 | 0.54149 | d: Bacteria(1.0000), p: Firmicutes(1.0000), c: Clostridia(1.0000), | 4902 |
| | | | | | o: Clostridiales(1.0000), f: Lachnospiraceae(0.8300), g: Clostridium_XIVa(0.4897), | |
| | | | | | s: Clostridium_{—}glycyrrhizinilyticum(0.2400) | |
| Ascusb_1179B | 202203087 | Ascusb_1179 | 97.3 | 0.57688 | d: Bacteria(1.0000), p: “Fibrobacteres”(1.0000), c: “Fibrobacteria”(1.0000), | 4903 |
| | | | | | o: “Fibrobacterales”(1.0000), f: “Fibrobacteraceae”(1.0000), g: Fibrobacter(1.0000), | |
| | | | | | s: Fibrobacter_{—}succinogenes_subsp._elongatus(0.8000) | |
| Ascusb_7150A | 202203087 | Ascusb_7150 | 99.6 | 0.50065 | d: Bacteria(1.0000), p: “Bacteroidetes”(0.9900), c: “Bacteroidia”(0.9603), | 4904 |
| | | | | | o: “Bacteroidales”(0.9315), f: Bacteroidaceae(0.8290), g: Bacteroides(0.7378), | |
| | | | | | s: Bacteroides_{—}uniformis(0.2435) | |
| Ascusb_3125A | 202203087 | Ascusb_3125 | 99.1 | 0.56819 | d: Bacteria(1.0000), p: “Actinobacteria”(0.5400), c: Actinobacteria(0.2916), | 4905 |
| | | | | | o: Actinomycetales(0.1516), f: Microbacteriaceae(0.0576), g: Microbacterium(0.0219), | |
| | | | | | s: Microbacterium_{—}pseudoresistens(0.0013) | |
| Ascusb_894A | 202203087 | Ascusb_894 | 99.6 | 0.60296 | d: Bacteria(1.0000), p: “Bacteroidetes”(0.9200), c: “Bacteroidia”(0.6624), | 4906 |
| | | | | | o: “Bacteroidales”(0.4769), f: Marinilabiliaceae(0.0954), g: Thermophagus(0.0114), | |
| | | | | | s: Thermophagus_{—}xiamenensis(0.0014) | |
| Ascusb_804B | 202203087 | Ascusb_804 | 99.6 | 0.65689 | d: Bacteria(1.0000), p: “Bacteroidetes”(0.9800), c: “Bacteroidia”(0.3528), | 4907 |
| | | | | | o: “Bacteroidales”(0.1270), f: “Porphyromonadaceae”(0.0292), g: Barnesiella(0.0050), | |
| | | | | | s: Barnesiella_{—}viscericola(0.0008) | |
| Ascusb_668A | 202203087 | Ascusb_668 | 99.6 | 0.63275 | d: Bacteria(1.0000), p: “Bacteroidetes”(0.9800), c: Flavobacteriia(0.5782), | 4908 |
| | | | | | o: “Flavobacteriales”(0.3411), f: Flavobacteriaceae(0.1876), g: Lutibacter(0.0356), | |
| | | | | | s: Lutibacter_{—}flavus(0.0068) | |
| Ascusb_10267A | 202203087 | Ascusb_10267 | 99.1 | 0.66729 | d: Bacteria(1.0000), p: “Bacteroidetes”(0.9800), c: “Bacteroidia”(0.5292), | 4909 |
| | | | | | o: “Bacteroidales”(0.2858), f: “Porphyromonadaceae”(0.0743), g: Barnesiella(0.0082), | |
| | | | | | s: Barnesiella_{—}viscericola(0.0009) | |
| Ascusb_2188B | 202203087 | Ascusb_2188 | 99.1 | 0.53226 | d: Bacteria(1.0000), p: “Bacteroidetes”(0.9800), c: “Bacteroidia”(0.5390), | 4910 |
| | | | | | o: “Bacteroidales”(0.2965), f: “Porphyromonadaceae”(0.0949), g: Barnesiella(0.0133), | |
| | | | | | s: Barnesiella_{—}viscericola(0.0019) | |
| Ascusb_1785A | 202203087 | Ascusb_1785 | 99.1 | 0.83433 | d: Bacteria(1.0000), p: “Bacteroidetes”(0.7700), c: “Bacteroidia”(0.2849), | 4911 |
| | | | | | o: “Bacteroidales”(0.1054), f: Bacteroidaceae(0.0095), g: Bacteroides(0.0009), | |
| | | | | | s: Bacteroides_{—}uniformis(0.0001) | |
| Ascusb_372A | 202203087 | Ascusb_372 | 99.6 | 0.82099 | d: Bacteria(1.0000), p: “Spirochaetes”(0.9100), c: Spirochaetia(0.8281), | 4912 |
| | | | | | o: Spirochaetales(0.7536), f: Spirochaetaceae(0.6857), g: Treponema(0.5760), | |
| | | | | | s: Treponema_{—}bryantii(0.2938) | |
| Ascusb_1007A | 202203087 | Ascusb_1007 | 99.1 | 0.48532 | d: Bacteria(1.0000), p: Firmicutes(0.8700), c: Clostridia(0.6960), | 4913 |
| | | | | | o: Clostridiales(0.5568), f: Lachnospiraceae(0.3508), g: Lachnospiracea_{—}incertae_{—}sedis(0.1017), | |
| | | | | | s: Eubacterium_{—}rectale(0.0092) | |
| Ascusb_1212A | 202203087 | Ascusb_1212 | 99.6 | 0.69772 | d: Bacteria(1.0000), p: “Bacteroidetes”(0.9100), c: “Bacteroidia”(0.4368), | 4914 |
| | | | | | o: “Bacteroidales”(0.2097), f: “Rikenellaceae”(0.0419), g: Anaerocella(0.0046), | |
| | | | | | s: Anaerocella_{—}delicata(0.0005) | |
| Ascusb_1476A | 202203087 | Ascusb_1476 | 99.1 | 0.46641 | d: Bacteria(1.0000), p: Firmicutes(0.8400), c: Clostridia(0.6720), | 4915 |
| | | | | | o: Clostridiales(0.5376), f: Ruminococcaceae(0.4140), g: Ruminococcus(0.2691), | |
| | | | | | s: Ruminococcus_{—}flavefaciens(0.1345) | |
| Ascusb_5237A | 202203087 | Ascusb_5237 | 99.1 | 0.56833 | d: Bacteria(1.0000), p: “Bacteroidetes”(0.8000), c: “Bacteroidia”(0.3520), | 4916 |
| | | | | | o: “Bacteroidales”(0.1549), f: “Porphyromonadaceae”(0.0511), g: Parabacteroides(0.0148), | |
| | | | | | s: Parabacteroides_{—}merdae(0.0018) | |
| Ascusb_3521A | 202203087 | Ascusb_3521 | 97.8 | 0.5951 | d: Bacteria(1.0000), p: Firmicutes(0.7700), c: Clostridia(0.5621), | 4917 |
| | | | | | o: Clostridiales(0.4103), f: Lachnospiraceae(0.1764), g: Lachnospiracea_{—}incertae_{—}sedis(0.0388), | |
| | | | | | s: Eubacterium_{—}xylanophilum(0.0054) | |
| Ascusb_3379A | 202203087 | Ascusb_3379 | 97.8 | 0.50095 | d: Bacteria(1.0000), p: “Bacteroidetes”(0.8100), c: “Bacteroidia”(0.3483), | 4918 |
| | | | | | o: “Bacteroidales”(0.1498), f: “Porphyromonadaceae”(0.0509), g: Parabacteroides(0.0143), | |
| | | | | | s: Parabacteroides_{—}distasonis(0.0030) | |
| Ascusb_466A | 202203087 | Ascusb_466 | 100 | 0.81206 | d: Bacteria(1.0000), p: Candidatus_Saccharibacteria(0.9600), | 4919 |
| | | | | | g: Saccharibacteria_{—}genera_{—}incertae_{—}sedis(0.9216) | |
| Ascusb_6159A | 202203087 | Ascusb_6159 | 99.1 | 0.4612 | d: Bacteria(1.0000), p: Firmicutes(0.7600), c: Bacilli(0.4484), | 4920 |
| | | | | | o: Lactobacillustobacillaceae(0.0592), g: Lactobacillus(0.0095), | |
| | | | | | s: Lactobacillus_{—}manihotivorans(0.0009) | |
| Ascusb_299A | 202203087 | Ascusb_299 | 100 | 0.89262 | d: Bacteria(1.0000), p: Candidatus_Saccharibacteria(0.9300), | 4921 |
| | | | | | g: Saccharibacteria_{—}genera_{—}incertae_{—}sedis(0.8649) | |
| Ascusb_346A | 202203087 | Ascusb_346 | 97.8 | 0.80981 | d: Bacteria(1.0000), p: Candidatus_Saccharibacteria(0.9500), | 4922 |
| | | | | | g: Saccharibacteria_{—}genera_{—}incertae_{—}sedis(0.9025) | |
| Ascusb_2179B | 202203087 | Ascusb_2179 | 100 | 0.65257 | d: Bacteria(1.0000), p: “Synergistetes”(0.2600), c: Synergistia(0.0676), | 4923 |
| | | | | | o: Synergistales(0.0176), f: Synergistaceae(0.0046), g: Aminiphilus(0.0012), | |
| | | | | | s: Aminiphilus_{—}circumscriptus(0.0003) | |
| Ascusb_4208A | 202203087 | Ascusb_4208 | 97.8 | 0.47458 | d: Bacteria(1.0000), p: Firmicutes(0.9200), c: Erysipelotrichia(0.2024), | 4924 |
| | | | | | o: Erysipelotrichales(0.0445), f: Erysipelotrichaceae(0.0098), g: Turicibacter(0.0018), | |
| | | | | | s: Turicibacter_{—}sanguinis(0.0003) | |
| Ascusb_9477A | 202203087 | Ascusb_9477 | 99.6 | 0.44712 | d: Bacteria(1.0000), p: “Bacteroidetes”(0.9600), c: “Bacteroidia”(0.3840), | 4925 |
| | | | | | o: “Bacteroidales”(0.1536), f: “Porphyromonadaceae”(0.0369), g: Parabacteroides(0.0070), | |
| | | | | | s: Parabacteroidesdistasonis(0.0013) | |
| Ascusb_4760A | 202203087 | Ascusb_4760 | 99.6 | 0.58499 | d: Bacteria(1.0000), p: “Bacteroidetes”(0.9900), c: “Bacteroidia”(0.4653), | 4926 |
| | | | | | o: “Bacteroidales”(0.2187), f: “Porphyromonadaceae”(0.0700), g: Parabacteroides(0.0189), | |
| | | | | | s: Parabacteroides_{—}distasonis(0.0049) | |
| Ascusb_1532A | 202203087 | Ascusb_1532 | 100 | 0.5383 | d: Bacteria(1.0000), p: “Bacteroidetes”(0.9700), c: Cytophagia(0.2328), | 4927 |
| | | | | | o: Cytophagales(0.0559), f: Flammeovirgaceae(0.0123), g: Aureibacter(0.0018), | |
| | | | | | s: Aureibacter_{—}tunicatorum(0.0003) | |
| Ascusb_7836A | 202203087 | Ascusb_7836 | 100 | 0.62363 | d: Bacteria(1.0000), p: Firmicutes(0.7900), c: Clostridia(0.5925), | 4928 |
| | | | | | o: Clostridiales(0.4444), f: Lachnospiraceae(0.1822), g: Lachnospiracea_{—}incertae_{—}sedis(0.0510), | |
| | | | | | s: Eubacterium_{—}xylanophilum(0.0122) | |
| Ascusb_5587A | 202203087 | Ascusb_5587 | 97.3 | 0.47371 | d: Bacteria(1.0000), p: “Bacteroidetes”(0.8100), c: “Bacteroidia”(0.5589), | 4929 |
| | | | | | o: “Bacteroidales”(0.3856), f: “Porphyromonadaceae”(0.1813), g: Butyricimonas(0.0272), | |
| | | | | | s: Butyricimonas_{—}synergistica(0.0022) | |
| Ascusb_2341A | 202203087 | Ascusb_2341 | 97.8 | 0.67832 | d: Bacteria(1.0000), p: “Bacteroidetes”(1.0000), c: “Bacteroidia”(1.0000), | 4930 |
| | | | | | o: “Bacteroidales”(1.0000), f: “Prevotellaceae”(1.0000), g: Prevotella(1.0000), | |
| | | | | | s: Prevotella_{—}brevis(1.0000) | |
| Ascusb_6424A | 202203087 | Ascusb_6424 | 97.3 | 0.54457 | d: Bacteria(1.0000), p: “Bacteroidetes”(0.9000), c: “Bacteroidia”(0.6390), | 4931 |
| | | | | | o: “Bacteroidales”(0.4537), f: “Porphyromonadaceae”(0.2495), g: Barnesiella(0.0599), | |
| | | | | | s: Barnesiella_{—}viscericola(0.0120) | |
| Ascusb_1079B | 202203087 | Ascusb_1079 | 100 | 0.55329 | d: Bacteria(1.0000), p: “Bacteroidetes”(1.0000), c: “Bacteroidia”(0.3300), | 4932 |
| | | | | | o: “Bacteroidales”(0.1089), f: Marinilabiliaceae(0.0163), g: Alkaliflexus(0.0023), | |
| | | | | | s: Alkaliflexus_{—}imshenetskii(0.0003) | |
| Ascusb_9544A | 202203087 | Ascusb_9544 | 99.1 | 0.53893 | d: Bacteria(1.0000), p: Firmicutes(0.4100), c: Erysipelotrichia(0.0451), | 4933 |
| | | | | | o: Erysipelotrichales(0.0050), f: Erysipelotrichaceae(0.0005), g: Turicibacter(0.0000), | |
| | | | | | s: Turicibacter_{—}sanguinis(0.0000) | |
| Ascusb_5179A | 202203087 | Ascusb_5179 | 99.1 | 0.5095 | d: Bacteria(1.0000), p: “Bacteroidetes”(1.0000), c: “Bacteroidia”(1.0000), | 4934 |
| | | | | | o: “Bacteroidales”(1.0000), f: “Prevotellaceae”(0.8000), g: Prevotella(0.6400), | |
| | | | | | s: Prevotella_{—}brevis(0.4416) | |
| Ascusb_295B | 202203087 | Ascusb_295 | 99.6 | 0.88875 | d: Bacteria(1.0000), p: SR1(1.0000), g: SR1_genera_incertae_sedis(1.0000) | 4935 |
| Ascusb_4081A | 202203087 | Ascusb_4081 | 98.7 | 0.71508 | d: Bacteria(1.0000), p: Firmicutes(0.2900), c: Bacilli(0.0696), | 4936 |
| | | | | | o: Bacillales(0.0146), f: Staphylococcaceae(0.0025), g: Staphylococcus(0.0004), | |
| | | | | | s: Staphylococcus_{—}rostri(0.0000) | |
| Ascusb_820A | 202203087 | Ascusb_820 | 99.6 | 0.49904 | d: Bacteria(1.0000), p: “Bacteroidetes”(0.9100), c: Flavobacteriia(0.3276), | 4937 |
| | | | | | o: “Flavobacteriales”(0.1179), f: Flavobacteriaceae(0.0425), g: Lutibacter(0.0030), | |
| | | | | | s: Lutibacter_{—}flavus(0.0002) | |
| Ascusb_57A | 202203087 | Ascusb_57 | 100 | 0.51727 | d: Bacteria(1.0000), p: “Bacteroidetes”(1.0000), c: “Bacteroidia”(1.0000), | 4938 |
| | | | | | o: “Bacteroidales”(1.0000), f: “Prevotellaceae”(0.9800), g: Prevotella(0.9604), | |
| | | | | | s: Prevotella_{—}brevis(0.8548) | |
| Ascusb_17128A | 202203087 | Ascusb_17128 | 99.1 | 0.53035 | d: Bacteria(1.0000), p: “Bacteroidetes”(1.0000), c: “Bacteroidia”(0.9900), | 4939 |
| | | | | | o: “Bacteroidales”(0.9801), f: “Prevotellaceae”(09605), g: Prevotella(0.9413), | |
| | | | | | s: Prevotella_{—}brevis(0.8283) | |
| Ascusb_1312A | 202203087 | Ascusb_1312 | 100 | 0.5423 | d: Bacteria(1.0000), p: Firmicutes(0.7600), c: Erysipelotrichia(0.2812), | 4940 |
| | | | | | o: Erysipelotrichales(0.1040), f: Erysipelotrichaceae(0.0385), g: Solobacterium(0.0035), | |
| | | | | | s: Solobacterium_{—}moorei(0.0003) | |
| Ascusb_4803A | 202203087 | Ascusb_4803 | 99.1 | 0.49114 | d: Bacteria(1.0000), p: “Spirochaetes”(0.8800), c: Spirochaetia(0.7744), | 4941 |
| | | | | | o: Spirochaetales(0.6815), f: Spirochaetaceae(0.5997), g: Treponema(0.5037), | |
| | | | | | s: Treponema_{—}zuelzerae(0.1360) | |
| Ascusb_16442C | 202203086 | Ascusb_16442 | 97.3 | 0.51147 | d: Bacteria(1.0000), p: “Fibrobacteres”(1.0000), c: “Fibrobacteria”(1.0000), | 4942 |
| | | | | | o: “Fibrobacterales”(1.0000), f: “Fibrobacteraceae”(1.0000), g: Fibrobacter(1.0000), | |
| | | | | | s: Fibrobacter_{—}succinogenes_subsp._elongatus(0.7700) | |
| Ascusb_17A | 202203086 | Ascusb_17 | 100 | 0.97384 | d: Bacteria(1.0000), p: Firmicutes(0.8349), c: Clostridia(0.5251), | 4943 |
| | | | | | o: Clostridiales(0.2714), f: Ruminococcaceae(0.1242), g: Acetanaerobacterium(0.0144) | |
| Ascusb_409A | 202203086 | Ascusb_409 | 100 | 0.90212 | d: Bacteria(1.0000), p: Firmicutes(0.5215), c: Erysipelotrichia(0.2851), | 4944 |
| | | | | | o: Erysipelotrichales(0.1324), f: Erysipelotrichaceae(0.0570), g: Solobacterium(0.0073) | |
| Ascusb_17848A | 202203086 | Ascusb_17848 | 100 | 0.78171 | d: Bacteria(1.0000), p: “Bacteroidetes”(0.9992), c: “Bacteroidia”(0.8756), | 4945 |
| | | | | | o: “Bacteroidales”(0.5860), f: “Prevotellaceae”(0.1242), g: Prevotella(0.0283) | |

TABLE 4
Budapest Treaty Deposits of the Disclosure

| Depository | Accession Number | Date of Deposit |
|---|---|---|
| NRRL | NRRL Y-67249 | Apr. 27, 2016 |
| NRRL | NRRL B-67248 | Apr. 27, 2016 |
| NRRL | NRRL B-67347 | Dec. 15, 2016 |
| NRRL | NRRL B-67348 | Dec. 15, 2016 |
| NRRL | NRRL B-67349 | Dec. 15, 2016 |
| Bigelow | PATENT201612001 | Dec. 12, 2016 |
| Bigelow | PATENT201612002 | Dec. 12, 2016 |
| Bigelow | PATENT201612003 | Dec. 12, 2016 |
| Bigelow | PATENT201612004 | Dec. 12, 2016 |
| Bigelow | PATENT201612005 | Dec. 12, 2016 |
| Bigelow | PATENT201612006 | Dec. 12, 2016 |
| Bigelow | PATENT201612007 | Dec. 15, 2016 |
| Bigelow | PATENT201612008 | Dec. 15, 2016 |
| Bigelow | PATENT201612009 | Dec. 15, 2016 |
| Bigelow | PATENT201612010 | Dec. 15, 2016 |
| Bigelow | PATENT201612011 | Dec. 15, 2016 |
| Bigelow | PATENT201612012 | Dec. 15, 2016 |
| Bigelow | PATENT201612013 | Dec. 19, 2016 |
| Bigelow | PATENT201612014 | Dec. 28, 2016 |
| Bigelow | 202203086 | Mar. 25, 2022 |
| Bigelow | 202203087 | March 25, 2022 |
| ATCC | PTA-125917⁵ | May 7, 2019 |
| ATCC | TSD-225⁶ | Oct. 31, 2020 |
| NRRL | NRRL B-67764⁷ | Apr. 11, 2019 |
| NCTC | NCTC 14479⁸ | Jan. 21, 2021 |

⁵Deposit number applicable to Budapest treaty and/or type strain rules and procedures
⁶Deposit number applicable to Budapest treaty and/or type strain rules and procedures
⁷Deposit number applicable to Budapest treaty and/or type strain rules and procedures
⁸Deposit number applicable to Budapest treaty and/or type strain rules and procedures

### DETAILED DESCRIPTION

### Definitions

[0043] While the following terms are believed to be well understood by one of ordinary skill in the art, the following definitions are set forth to facilitate explanation of the presently disclosed subject matter.

[0044] The term “a” or “an” may refer to one or more of that entity, i.e. can refer to plural referents. As such, the terms “a” or “an”, “one or more” and “at least one” are used interchangeably herein. In addition, reference to “an element” by the indefinite article “a” or “an” does not exclude the possibility that more than one of the elements is present, unless the context clearly requires that there is one and only one of the elements.

[0045] Reference throughout this specification to “one embodiment”, “an embodiment”, “one aspect”, or “an aspect” means that a particular feature, structure or characteristic described in connection with the embodiment is included in at least one embodiment of the present disclosure. Thus, the appearances of the phrases “in one embodiment” or “in an embodiment” in various places throughout this specification are not necessarily all referring to the same embodiment. Furthermore, the particular features, structures, or characteristics can be combined in any suitable manner in one or more embodiments.

[0046] As used herein, in particular embodiments, the terms “about” or “approximately” when preceding a numerical value indicates the value plus or minus a range of 10%.

[0047] As used herein the terms “microorganism” or “microbe” should be taken broadly. These terms are used interchangeably and include, but are not limited to, the two prokaryotic domains, Bacteria and Archaea, eukaryotic fungi and protists, as well as viruses. In some embodiments, the disclosure refers to the “microbes” of Tables 1, 3, and 14, or the “microbes” incorporated by reference. This characterization can refer to not only the predicted taxonomic microbial identifiers of the table, but also the identified strains of the microbes listed in the table.

[0048] The term “microbial consortia” or “microbial consortium” refers to a subset of a microbial community of individual microbial species, or strains of a species, which can be described as carrying out a common function, or can be described as participating in, or leading to, or correlating with, a recognizable parameter, such as a phenotypic trait of interest (e.g. increased milk production in a ruminant). The community may comprise two or more species, or strains of a species, of microbes. In some instances, the microbes coexist within the community symbiotically.

[0049] The term “microbial community” means a group of microbes comprising two or more species or strains. Unlike microbial consortia, a microbial community does not have to be carrying out a common function, or does not have to be participating in, or leading to, or correlating with, a recognizable parameter, such as a phenotypic trait of interest (e.g. increased milk production in a ruminant).

[0050] As used herein, “isolate,” “isolated,” “isolated microbe,” and like terms, are intended to mean that the one or more microorganisms has been separated from at least one of the materials with which it is associated in a particular environment (for example soil, water, animal tissue).

[0051] Microbes of the present disclosure may include spores and/or vegetative cells. In some embodiments, microbes of the present disclosure include microbes in a viable but non-culturable (VBNC) state. See Liao and Zhao (US Publication US2015267163A1). In some embodiments, microbes of the present disclosure include microbes in a biofilm. See Merritt et al. (U.S. Pat. No. 7,427,408).

[0052] Thus, an “isolated microbe” does not exist in its naturally occurring environment; rather, it is through the various techniques described herein that the microbe has been removed from its natural setting and placed into a non-naturally occurring state of existence. Thus, the isolated strain or isolated microbe may exist as, for example, a biologically pure culture, or as spores (or other forms of the strain) in association with an acceptable carrier.

[0053] As used herein, “spore” or “spores” refer to structures produced by bacteria and fungi that are adapted for survival and dispersal. Spores are generally characterized as dormant structures, however spores are capable of differentiation through the process of germination. Germination is the differentiation of spores into vegetative cells that are capable of metabolic activity, growth, and reproduction. The germination of a single spore results in a single fungal or bacterial vegetative cell. Fungal spores are units of asexual reproduction, and in some cases are necessary structures in fungal life cycles. Bacterial spores are structures for surviving conditions that may ordinarily be nonconductive to the survival or growth of vegetative cells.

[0054] As used herein, “microbial composition” refers to a composition comprising one or more microbes of the present disclosure, wherein a microbial composition, in some embodiments, is administered to animals of the present disclosure.

[0055] As used herein, “carrier”, “acceptable carrier”, or “pharmaceutical carrier” refers to a diluent, adjuvant, excipient, or vehicle with which the compound is administered. Such carriers can be sterile liquids, such as water and oils, including those of petroleum, animal, vegetable, or synthetic origin; such as peanut oil, soybean oil, mineral oil, sesame oil, and the like. Water or aqueous solution saline solutions and aqueous dextrose and glycerol solutions are preferably employed as carriers, in some embodiments as injectable solutions. Alternatively, the carrier can be a solid dosage form carrier, including but not limited to one or more of a binder (for compressed pills), a glidant, an encapsulating agent, a flavorant, and a colorant. The choice of carrier can be selected with regard to the intended route of administration and standard pharmaceutical practice. See Hardee and Baggo (1998. Development and Formulation of Veterinary Dosage Forms. 2^{nd} Ed. CRC Press. 504 pg.); E. W. Martin (1970. Remington's Pharmaceutical Sciences. 17^{th} Ed. Mack Pub. Co.); and Blaser et al. (US Publication US20110280840A1).

[0056] In certain aspects of the disclosure, the isolated microbes exist as isolated and biologically pure cultures. It will be appreciated by one of skill in the art, that an isolated and biologically pure culture of a particular microbe, denotes that said culture is substantially free (within scientific reason) of other living organisms and contains only the individual microbe in question. The culture can contain varying concentrations of said microbe. The present disclosure notes that isolated and biologically pure microbes often “necessarily differ from less pure or impure materials.” See, e.g. In re Bergstrom, 427 F.2d 1394, (CCPA 1970)(discussing purified prostaglandins), see also, In re Bergy, 596 F.2d 952 (CCPA 1979)(discussing purified microbes), see also, Parke-Davis & Co. v. HK Mulford & Co., 189 F. 95 (S.D.N.Y. 1911) (Learned Hand discussing purified adrenaline), aff'd in part, rev'd in part, 196 F. 496 (2d Cir. 1912), each of which are incorporated herein by reference. Furthermore, in some aspects, the disclosure provides for certain quantitative measures of the concentration, or purity limitations, that must be found within an isolated and biologically pure microbial culture. The presence of these purity values, in certain embodiments, is a further attribute that distinguishes the presently disclosed microbes from those microbes existing in a natural state. See, e.g., Merck & Co. v. Olin Mathieson Chemical Corp., 253 F.2d 156 (4th Cir. 1958) (discussing purity limitations for vitamin B12 produced by microbes), incorporated herein by reference.

[0057] As used herein, “individual isolates” should be taken to mean a composition, or culture, comprising a predominance of a single genera, species, or strain, of microorganism, following separation from one or more other microorganisms. The phrase should not be taken to indicate the extent to which the microorganism has been isolated or purified. However, “individual isolates” can comprise substantially only one genus, species, or strain, of microorganism.

[0058] As used herein, “microbiome” refers to the collection of microorganisms that inhabit the digestive tract or gastrointestinal tract of an animal (including the rumen if said animal is a ruminant) and the microorgansims' physical environment (i.e. the microbiome has a biotic and physical component). The microbiome is fluid and may be modulated by numerous naturally occurring and artificial conditions (e.g., change in diet, disease, antimicrobial agents, influx of additional microorganisms, etc.). The modulation of the microbiome of a rumen that can be achieved via administration of the compositions of the disclosure, can take the form of (a) increasing or decreasing a particular Family, Genus, Species, or functional grouping of microbe (i.e. alteration of the biotic component of the rumen microbiome) and/or (b) increasing or decreasing volatile fatty acids in the rumen, increasing or decreasing rumen pH, increasing or decreasing any other physical parameter important for rumen health (i.e. alteration of the abiotic component of the rumen mircrobiome).

[0059] As used herein, “probiotic” refers to a substantially pure microbe (i.e., a single isolate) or a mixture of desired microbes, and may also include any additional components that can be administered to a mammal for restoring microbiota. Probiotics or microbial inoculant compositions of the invention may be administered with an agent to allow the microbes to survive the environment of the gastrointestinal tract, i.e., to resist low pH and to grow in the gastrointestinal environment. In some embodiments, the present compositions (e.g., microbial compositions) are probiotics in some aspects.

[0060] As used herein, “prebiotic” refers to an agent that increases the number and/or activity of one or more desired microbes. Non-limiting examples of prebiotics that may be useful in the methods of the present disclosure include fructooligosaccharides (e.g., oligofructose, inulin, inulin-type fructans), galactooligosaccharides, amino acids, alcohols, and mixtures thereof. See Ramirez-Farias et al. (2008. Br. J. Nutr. 4:1-10) and Pool-Zobel and Sauer (2007. J. Nutr. 137:2580-2584 and supplemental).

[0061] The term “growth medium” as used herein, is any medium which is suitable to support growth of a microbe. By way of example, the media may be natural or artificial including gastrin supplemental agar, LB media, blood serum, and tissue culture gels. It should be appreciated that the media may be used alone or in combination with one or more other media. It may also be used with or without the addition of exogenous nutrients.

[0062] The medium may be amended or enriched with additional compounds or components, for example, a component which may assist in the interaction and/or selection of specific groups of microorganisms. For example, antibiotics (such as penicillin) or sterilants (for example, quaternary ammonium salts and oxidizing agents) could be present and/or the physical conditions (such as salinity, nutrients (for example organic and inorganic minerals (such as phosphorus, nitrogenous salts, ammonia, potassium and micronutrients such as cobalt and magnesium), pH, and/or temperature) could be amended.

[0063] As used herein, the term “ruminant” includes mammals that are capable of acquiring nutrients from plant-based food by fermenting it in a specialized stomach (rumen) prior to digestion, principally through microbial actions. Ruminants included cattle, goats, sheep, giraffes, yaks, elk, deer, antelope, and others.

[0064] As used herein, the term “bovid” includes any member of family Bovidae, which include hoofed mammals such as antelope, sheep, goats, buffalo, bison, and cattle, among others.

[0065] As used herein, “energy-corrected milk” or “ECM” represents the amount of energy in milk based upon milk volume, milk fat, and milk protein. ECM adjusts the milk components to 3.5% fat and 3.2% protein, thus equalizing animal performance and allowing for comparison of production at the individual animal and herd levels over time. An equation used to calculate ECM, as related to the present disclosure, is:

$$ECM = ( 0.327 \times milk pounds ) + ( 12.95 \times fat pounds ) + ( 7.2 \times protein pounds )$$

[0066] As used herein, “improved” should be taken broadly to encompass improvement of a characteristic of interest, as compared to a control group, or as compared to a known average quantity associated with the characteristic in question. For example, “improved” milk production associated with application of a beneficial microbe, or consortia, of the disclosure can be demonstrated by comparing the milk produced by an ungulate treated by the microbes taught herein to the milk of an ungulate not treated. In the present disclosure, “improved” does not necessarily demand that the data be statistically significant (i.e. p<0.05); rather, any quantifiable difference demonstrating that one value (e.g. the average treatment value) is different from another (e.g. the average control value) can rise to the level of “improved.”

[0067] As used herein, “inhibiting and suppressing” and like terms should not be construed to require complete inhibition or suppression, although this may be desired in some embodiments.

[0068] The term “marker” or “unique marker” as used herein is an indicator of unique microorganism type, microorganism strain or activity of a microorganism strain. A marker can be measured in biological samples and includes without limitation, a nucleic acid-based marker such as a ribosomal RNA gene, a peptide- or protein-based marker, and/or a metabolite or other small molecule marker.

[0069] The term “metabolite” as used herein is an intermediate or product of metabolism. A metabolite in one embodiment is a small molecule. Metabolites have various functions, including in fuel, structural, signaling, stimulatory and inhibitory effects on enzymes, as a cofactor to an enzyme, in defense, and in interactions with other organisms (such as pigments, odorants and pheromones). A primary metabolite is directly involved in normal growth, development and reproduction. A secondary metabolite is not directly involved in these processes but usually has an important ecological function. Examples of metabolites include but are not limited to antibiotics and pigments such as resins and terpenes, etc. Some antibiotics use primary metabolites as precursors, such as actinomycin which is created from the primary metabolite, tryptophan. Metabolites, as used herein, include small, hydrophilic carbohydrates; large, hydrophobic lipids and complex natural compounds.

[0070] As used herein, the term “genotype” refers to the genetic makeup of an individual cell, cell culture, tissue, organism, or group of organisms.

[0071] As used herein, the term “allele(s)” means any of one or more alternative forms of a gene, all of which alleles relate to at least one trait or characteristic. In a diploid cell, the two alleles of a given gene occupy corresponding loci on a pair of homologous chromosomes. Since the present disclosure, in embodiments, relates to QTLs, i.e. genomic regions that may comprise one or more genes or regulatory sequences, it is in some instances more accurate to refer to “haplotype” (i.e. an allele of a chromosomal segment) instead of “allele”, however, in those instances, the term “allele” should be understood to comprise the term “haplotype”. Alleles are considered identical when they express a similar phenotype. Differences in sequence are possible but not important as long as they do not influence phenotype.

[0072] As used herein, the term “locus” (loci plural) means a specific place or places or a site on a chromosome where for example a gene or genetic marker is found.

[0073] As used herein, the term “genetically linked” refers to two or more traits that are co-inherited at a high rate during breeding such that they are difficult to separate through crossing.

[0074] A “recombination” or “recombination event” as used herein refers to a chromosomal crossing over or independent assortment. The term “recombinant” refers to an organism having a new genetic makeup arising as a result of a recombination event.

[0075] As used herein, the term “molecular marker” or “genetic marker” refers to an indicator that is used in methods for visualizing differences in characteristics of nucleic acid sequences. Examples of such indicators are restriction fragment length polymorphism (RFLP) markers, amplified fragment length polymorphism (AFLP) markers, single nucleotide polymorphisms (SNPs), insertion mutations, microsatellite markers (SSRs), sequence-characterized amplified regions (SCARs), cleaved amplified polymorphic sequence (CAPS) markers or isozyme markers or combinations of the markers described herein which defines a specific genetic and chromosomal location. Markers further include polynucleotide sequences encoding 16S or 18S rRNA, and internal transcribed spacer (ITS) sequences, which are sequences found between small-subunit and large-subunit rRNA genes that have proven to be especially useful in elucidating relationships or distinctions among when compared against one another. Mapping of molecular markers in the vicinity of an allele is a procedure which can be performed by the average person skilled in molecular-biological techniques.

[0076] The primary structure of major rRNA subunit 16S comprise a particular combination of conserved, variable, and hypervariable regions that evolve at different rates and enable the resolution of both very ancient lineages such as domains, and more modem lineages such as genera. The secondary structure of the 16S subunit include approximately 50 helices which result in base pairing of about 67% of the residues. These highly conserved secondary structural features are of great functional importance and can be used to ensure positional homology in multiple sequence alignments and phylogenetic analysis. Over the previous few decades, the 16S rRNA gene has become the most sequenced taxonomic marker and is the cornerstone for the current systematic classification of bacteria and archaea (Yarza et al. 2014. Nature Rev. Micro. 12:635-45).

[0077] A sequence identity of 94.5% or lower for two 16S rRNA genes is strong evidence for distinct genera, 86.5% or lower is strong evidence for distinct families, 82% or lower is strong evidence for distinct orders, 78.5% is strong evidence for distinct classes, and 75% or lower is strong evidence for distinct phyla. The comparative analysis of 16S rRNA gene sequences enables the establishment of taxonomic thresholds that are useful not only for the classification of cultured microorganisms but also for the classification of the many environmental sequences. Yarza et al. 2014. Nature Rev. Micro. 12:635-45).

[0078] As used herein, the term “trait” refers to a characteristic or phenotype. For example, in the context of some embodiments of the present disclosure, quantity of milk fat produced relates to the amount of triglycerides, triacylglycerides, diacylglycerides, monoacylglycerides, phospholipids, cholesterol, glycolipids, and fatty acids present in milk. Desirable traits may also include other milk characteristics, including but not limited to: predominance of short chain fatty acids, medium chain fatty acids, and long chain fatty acids; quantity of carbohydrates such as lactose, glucose, galactose, and other oligosaccharides; quantity of proteins such as caseins and whey; quantity of vitamins, minerals, milk yield/volume; reductions in methane emissions or manure; improved efficiency of nitrogen utilization; improved dry matter intake; improved feed efficiency and digestibility; increased degradation of cellulose, lignin, and hemicellulose; increased rumen concentrations of fatty acids such as acetic acid, propionic acid, and butyric acid; etc.

[0079] A trait may be inherited in a dominant or recessive manner, or in a partial or incomplete-dominant manner. A trait may be monogenic (i.e. determined by a single locus) or polygenic (i.e. determined by more than one locus) or may also result from the interaction of one or more genes with the environment.

[0080] In the context of this disclosure, traits may also result from the interaction of one or more mammalian genes and one or more microorganism genes.

[0081] As used herein, the term “homozygous” means a genetic condition existing when two identical alleles reside at a specific locus, but are positioned individually on corresponding pairs of homologous chromosomes in the cell of a diploid organism. Conversely, as used herein, the term “heterozygous” means a genetic condition existing when two different alleles reside at a specific locus, but are positioned individually on corresponding pairs of homologous chromosomes in the cell of a diploid organism.

[0082] As used herein, the term “phenotype” refers to the observable characteristics of an individual cell, cell culture, organism (e.g., a ruminant), or group of organisms which results from the interaction between that individual's genetic makeup (i.e., genotype) and the environment.

[0083] As used herein, the term “chimeric” or “recombinant” when describing a nucleic acid sequence or a protein sequence refers to a nucleic acid, or a protein sequence, that links at least two heterologous polynucleotides, or two heterologous polypeptides, into a single macromolecule, or that re-arranges one or more elements of at least one natural nucleic acid or protein sequence. For example, the term “recombinant” can refer to an artificial combination of two otherwise separated segments of sequence, e.g., by chemical synthesis or by the manipulation of isolated segments of nucleic acids by genetic engineering techniques.

[0084] As used herein, a “synthetic nucleotide sequence” or “synthetic polynucleotide sequence” is a nucleotide sequence that is not known to occur in nature or that is not naturally occurring. Generally, such a synthetic nucleotide sequence will comprise at least one nucleotide difference when compared to any other naturally occurring nucleotide sequence.

[0085] As used herein, the term “nucleic acid” refers to a polymeric form of nucleotides of any length, either ribonucleotides or deoxyribonucleotides, or analogs thereof. This term refers to the primary structure of the molecule, and thus includes double- and single-stranded DNA, as well as double- and single-stranded RNA. It also includes modified nucleic acids such as methylated and/or capped nucleic acids, nucleic acids containing modified bases, backbone modifications, and the like. The terms “nucleic acid” and “nucleotide sequence” are used interchangeably.

[0086] As used herein, the term “gene” refers to any segment of DNA associated with a biological function. Thus, genes include, but are not limited to, coding sequences and/or the regulatory sequences required for their expression. Genes can also include non-expressed DNA segments that, for example, form recognition sequences for other proteins. Genes can be obtained from a variety of sources, including cloning from a source of interest or synthesizing from known or predicted sequence information, and may include sequences designed to have desired parameters.

[0087] As used herein, the term “homologous” or “homologue” or “ortholog” is known in the art and refers to related sequences that share a common ancestor or family member and are determined based on the degree of sequence identity. The terms “homology,” “homologous,” “substantially similar” and “corresponding substantially” are used interchangeably herein. They refer to nucleic acid fragments wherein changes in one or more nucleotide bases do not affect the ability of the nucleic acid fragment to mediate gene expression or produce a certain phenotype. These terms also refer to modifications of the nucleic acid fragments of the instant disclosure such as deletion or insertion of one or more nucleotides that do not substantially alter the functional properties of the resulting nucleic acid fragment relative to the initial, unmodified fragment. It is therefore understood, as those skilled in the art will appreciate, that the disclosure encompasses more than the specific exemplary sequences. These terms describe the relationship between a gene found in one species, subspecies, variety, cultivar or strain and the corresponding or equivalent gene in another species, subspecies, variety, cultivar or strain. For purposes of this disclosure homologous sequences are compared. “Homologous sequences” or “homologues” or “orthologs” are thought, believed, or known to be functionally related. A functional relationship may be indicated in any one of a number of ways, including, but not limited to: (a) degree of sequence identity and/or (b) the same or similar biological function. Preferably, both (a) and (b) are indicated. Homology can be determined using software programs readily available in the art, such as those discussed in Current Protocols in Molecular Biology (F. M. Ausubel et al., eds., 1987) Supplement 30, section 7.718, Table 7.71. Some alignment programs are MacVector (Oxford Molecular Ltd, Oxford, U.K.), ALIGN Plus (Scientific and Educational Software, Pennsylvania) and AlignX (Vector NTI, Invitrogen, Carlsbad, CA). Another alignment program is Sequencher (Gene Codes, Ann Arbor, Michigan), using default parameters.

[0088] As used herein, the term “nucleotide change” refers to, e.g., nucleotide substitution, deletion, and/or insertion, as is well understood in the art. For example, mutations contain alterations that produce silent substitutions, additions, or deletions, but do not alter the properties or activities of the encoded protein or how the proteins are made.

[0089] As used herein, the term “protein modification” refers to, e.g., amino acid substitution, amino acid modification, deletion, and/or insertion, as is well understood in the art.

[0090] As used herein, the term “at least a portion” or “fragment” of a nucleic acid or polypeptide means a portion having the minimal size characteristics of such sequences, or any larger fragment of the full length molecule, up to and including the full length molecule. A fragment of a polynucleotide of the disclosure may encode a biologically active portion of a genetic regulatory element. A biologically active portion of a genetic regulatory element can be prepared by isolating a portion of one of the polynucleotides of the disclosure that comprises the genetic regulatory element and assessing activity as described herein. Similarly, a portion of a polypeptide may be 4 amino acids, 5 amino acids, 6 amino acids, 7 amino acids, and so on, going up to the full length polypeptide. The length of the portion to be used will depend on the particular application. A portion of a nucleic acid useful as a hybridization probe may be as short as 12 nucleotides; in some embodiments, it is 20 nucleotides. A portion of a polypeptide useful as an epitope may be as short as 4 amino acids. A portion of a polypeptide that performs the function of the full-length polypeptide would generally be longer than 4 amino acids.

[0091] Variant polynucleotides also encompass sequences derived from a mutagenic and recombinogenic procedure such as DNA shuffling. Strategies for such DNA shuffling are known in the art. See, for example, Stemmer (1994) PNAS 91:10747-10751; Stemmer (1994) Nature 370:389-391; Crameri et al. (1997) Nature Biotech. 15:436-438; Moore et al. (1997) J. Mol. Biol. 272:336-347; Zhang et al. (1997) PNAS 94:4504-4509; Crameri et al. (1998) Nature 391:288-291; and U.S. Pat. Nos. 5,605,793 and 5,837,458. For PCR amplifications of the polynucleotides disclosed herein, oligonucleotide primers can be designed for use in PCR reactions to amplify corresponding DNA sequences from cDNA or genomic DNA extracted from any organism of interest. Methods for designing PCR primers and PCR cloning are generally known in the art and are disclosed in Sambrook et al. (1989) Molecular Cloning: A Laboratory Manual (2nd ed., Cold Spring Harbor Laboratory Press, Plainview, New York). See also Innis et al., eds. (1990) PCR Protocols: A Guide to Methods and Applications (Academic Press, New York); Innis and Gelfand, eds. (1995) PCR Strategies (Academic Press, New York); and Innis and Gelfand, eds. (1999) PCR Methods Manual (Academic Press, New York). Known methods of PCR include, but are not limited to, methods using paired primers, nested primers, single specific primers, degenerate primers, gene-specific primers, vector-specific primers, partially-mismatched primers, and the like.

[0092] The term “primer” as used herein refers to an oligonucleotide which is capable of annealing to the amplification target allowing a DNA polymerase to attach, thereby serving as a point of initiation of DNA synthesis when placed under conditions in which synthesis of primer extension product is induced, i.e., in the presence of nucleotides and an agent for polymerization such as DNA polymerase and at a suitable temperature and pH. The (amplification) primer is preferably single stranded for maximum efficiency in amplification. Preferably, the primer is an oligodeoxyribonucleotide. The primer must be sufficiently long to prime the synthesis of extension products in the presence of the agent for polymerization. The exact lengths of the primers will depend on many factors, including temperature and composition (A/T vs. G/C content) of primer. A pair of bi-directional primers consists of one forward and one reverse primer as commonly used in the art of DNA amplification such as in PCR amplification.

[0093] The terms “stringency” or “stringent hybridization conditions” refer to hybridization conditions that affect the stability of hybrids, e.g., temperature, salt concentration, pH, formamide concentration and the like. These conditions are empirically optimized to maximize specific binding and minimize non-specific binding of primer or probe to its target nucleic acid sequence. The terms as used include reference to conditions under which a probe or primer will hybridize to its target sequence, to a detectably greater degree than other sequences (e.g. at least 2-fold over background). Stringent conditions are sequence dependent and will be different in different circumstances. Longer sequences hybridize specifically at higher temperatures. Generally, stringent conditions are selected to be about 5° C. lower than the thermal melting point (Tm) for the specific sequence at a defined ionic strength and pH. The Tm is the temperature (under defined ionic strength and pH) at which 50% of a complementary target sequence hybridizes to a perfectly matched probe or primer. Typically, stringent conditions will be those in which the salt concentration is less than about 1.0 M Na⁺ ion, typically about 0.01 to 1.0 M Na⁺ ion concentration (or other salts) at pH 7.0 to 8.3 and the temperature is at least about 30° C. for short probes or primers (e.g. 10 to 50 nucleotides) and at least about 60° C. for long probes or primers (e.g. greater than 50 nucleotides). Stringent conditions may also be achieved with the addition of destabilizing agents such as formamide. Exemplary low stringent conditions or “conditions of reduced stringency” include hybridization with a buffer solution of 30% formamide, 1 M NaCl, 1% SDS at 37° C. and a wash in 2×SSC at 40° C. Exemplary high stringency conditions include hybridization in 50% formamide, 1M NaCl, 1% SDS at 37° C., and a wash in 0.1×SSC at 60° C. Hybridization procedures are well known in the art and are described by e.g. Ausubel et al., 1998 and Sambrook et al., 2001. In some embodiments, stringent conditions are hybridization in 0.25 M Na2HPO4 buffer (pH 7.2) containing 1 mM Na2EDTA, 0.5-20% sodium dodecyl sulfate at 45° C., such as 0.5%, 1%, 2%, 3%, 4%, 5%, 6%, 7%, 8%, 9%, 10%, 11%, 12%, 13%, 14%, 15%, 16%, 17%, 18%, 19% or 20%, followed by a wash in 5×SSC, containing 0.1% (w/v) sodium dodecyl sulfate, at 55° C. to 65° C.

[0094] As used herein, “promoter” refers to a DNA sequence capable of controlling the expression of a coding sequence or functional RNA. The promoter sequence consists of proximal and more distal upstream elements, the latter elements often referred to as enhancers. Accordingly, an “enhancer” is a DNA sequence that can stimulate promoter activity, and may be an innate element of the promoter or a heterologous element inserted to enhance the level or tissue specificity of a promoter. Promoters may be derived in their entirety from a native gene, or be composed of different elements derived from different promoters found in nature, or even comprise synthetic DNA segments. It is understood by those skilled in the art that different promoters may direct the expression of a gene in different tissues or cell types, or at different stages of development, or in response to different environmental conditions. It is further recognized that since in most cases the exact boundaries of regulatory sequences have not been completely defined, DNA fragments of some variation may have identical promoter activity.

[0095] As used herein, a “constitutive promoter” is a promoter which is active under most conditions and/or during most development stages. There are several advantages to using constitutive promoters in expression vectors used in biotechnology, such as: high level of production of proteins used to select transgenic cells or organisms; high level of expression of reporter proteins or scorable markers, allowing easy detection and quantification; high level of production of a transcription factor that is part of a regulatory transcription system; production of compounds that requires ubiquitous activity in the organism; and production of compounds that are required during all stages of development. Non-limiting exemplary constitutive promoters include, CaMV 35S promoter, opine promoters, ubiquitin promoter, alcohol dehydrogenase promoter, etc.

[0096] As used herein, a “non-constitutive promoter” is a promoter which is active under certain conditions, in certain types of cells, and/or during certain development stages. For example, tissue specific, tissue preferred, cell type specific, cell type preferred, inducible promoters, and promoters under development control are non-constitutive promoters. Examples of promoters under developmental control include promoters that preferentially initiate transcription in certain tissues.

[0097] As used herein, “inducible” or “repressible” promoter is a promoter which is under chemical or environmental factors control. Examples of environmental conditions that may affect transcription by inducible promoters include anaerobic conditions, certain chemicals, the presence of light, acidic or basic conditions, etc.

[0098] As used herein, a “tissue specific” promoter is a promoter that initiates transcription only in certain tissues. Unlike constitutive expression of genes, tissue-specific expression is the result of several interacting levels of gene regulation. As such, in the art sometimes it is preferable to use promoters from homologous or closely related species to achieve efficient and reliable expression of transgenes in particular tissues. This is one of the main reasons for the large amount of tissue-specific promoters isolated from particular tissues found in both scientific and patent literature.

[0099] As used herein, the term “operably linked” refers to the association of nucleic acid sequences on a single nucleic acid fragment so that the function of one is regulated by the other. For example, a promoter is operably linked with a coding sequence when it is capable of regulating the expression of that coding sequence (i.e., that the coding sequence is under the transcriptional control of the promoter). Coding sequences can be operably linked to regulatory sequences in a sense or antisense orientation. In another example, the complementary RNA regions of the disclosure can be operably linked, either directly or indirectly, 5′ to the target mRNA, or 3′ to the target mRNA, or within the target mRNA, or a first complementary region is 5′ and its complement is 3′ to the target mRNA.

[0100] As used herein, the phrases “recombinant construct”, “expression construct”, “chimeric construct”, “construct”, and “recombinant DNA construct” are used interchangeably herein. A recombinant construct comprises an artificial combination of nucleic acid fragments, e.g., regulatory and coding sequences that are not found together in nature. For example, a chimeric construct may comprise regulatory sequences and coding sequences that are derived from different sources, or regulatory sequences and coding sequences derived from the same source, but arranged in a manner different than that found in nature. Such construct may be used by itself or may be used in conjunction with a vector. If a vector is used then the choice of vector is dependent upon the method that will be used to transform host cells as is well known to those skilled in the art. For example, a plasmid vector can be used. The skilled artisan is well aware of the genetic elements that must be present on the vector in order to successfully transform, select and propagate host cells comprising any of the isolated nucleic acid fragments of the disclosure. The skilled artisan will also recognize that different independent transformation events will result in different levels and patterns of expression (Jones et al., (1985) EMBO J. 4:2411-2418; De Almeida et al., (1989) Mol. Gen. Genetics 218:78-86), and thus that multiple events must be screened in order to obtain lines displaying the desired expression level and pattern. Such screening may be accomplished by Southern analysis of DNA, Northern analysis of mRNA expression, immunoblotting analysis of protein expression, or phenotypic analysis, among others. Vectors can be plasmids, viruses, bacteriophages, pro-viruses, phagemids, transposons, artificial chromosomes, and the like, that replicate autonomously or can integrate into a chromosome of a host cell. A vector can also be a naked RNA polynucleotide, a naked DNA polynucleotide, a polynucleotide composed of both DNA and RNA within the same strand, a poly-lysine-conjugated DNA or RNA, a peptide-conjugated DNA or RNA, a liposome-conjugated DNA, or the like, that is not autonomously replicating. As used herein, the term “expression” refers to the production of a functional end-product e.g., an mRNA or a protein (precursor or mature).

[0101] In some embodiments, the cell or organism has at least one heterologous trait. As used herein, the term “heterologous trait” refers to a phenotype imparted to a transformed host cell or transgenic organism by an exogenous DNA segment, heterologous polynucleotide or heterologous nucleic acid. Various changes in phenotype are of interest to the present disclosure, including but not limited to modifying the fatty acid composition in milk, altering the carbohydrate content of milk, increasing an ungulate's yield of an economically important trait (e.g., milk, milk fat, milk proteins, etc.) and the like. These results can be achieved by providing expression ofheterologous products or increased expression of endogenous products in organisms using the methods and compositions of the present disclosure.

[0102] As used herein, the term “MIC” means maximal information coefficient. MIC is a type of nonparamentric network analysis that identifies a score (MIC score) between active microbial strains of the present disclosure and at least one measured metadata (e.g., milk fat). Further, U.S. application Ser. No. 15/217,575, filed on Jul. 22, 2016 (issued as U.S. Pat. No. 9,540,676 on Jan. 10, 2017) is hereby incorporated by reference in its entirety.

[0103] The maximal information coefficient (MIC) is then calculated between strains and metadata 3021a, and between strains 3021b; as seen in FIG. 3. Results are pooled to create a list of all relationships and their corresponding MIC scores 3022. If the relationship scores below a given threshold 3023, the relationship is deemed/identified as irrelevant 3023b. If the relationship is above a given threshold 3023, the relationship deemed/identified as relevant 2023a, and is further subject to network analysis 3024. The following code fragment shows an exemplary methodology for such analysis, according to one embodiment:

Read total list of relationships file as links

```
threshold = 0.8
for i in range(len(links)):
  if links >= threshold
    multiplier[i] = 1
  else
    multiplier[i] = 0
  end if
  links_temp = multiplier*links
  final_links = links_temp[links_temp != 0]
  savetxt(output_file,final_links)
  output_file.close( )
```

[0104] Based on the output of the network analysis, active strains are selected 3025 for preparing products (e.g., ensembles, aggregates, and/or other synthetic groupings) containing the selected strains. The output of the network analysis can also be used to inform the selection of strains for further product composition testing.

[0105] The use of thresholds is discussed above for analyses and determinations. Thresholds can be, depending on the implementation and application: (1) empirically determined (e.g., based on distribution levels, setting a cutoff at a number that removes a specified or significant portion of low level reads); (2) any non-zero value; (3) percentage/percentile based; (4) only strains whose normalized second marker (i.e., activity) reads is greater than normalized first marker (cell count) reads; (5) log 2 fold change between activity and quantity or cell count; (6) normalized second marker (activity) reads is greater than mean second marker (activity) reads for entire sample (and/or sample set); and/or any magnitude threshold described above in addition to a statistical threshold (i.e., significance testing). The following example provides thresholding detail for distributions of RNA-based second marker measurements with respect to DNA-based first marker measurements, according to one embodiment.

[0106] As used herein “shelf-stable” refers to a functional attribute and new utility acquired by the microbes formulated according to the disclosure, which enable said microbes to exist in a useful/active state outside of their natural environment in the rumen (i.e. a markedly different characteristic). Thus, shelf-stable is a functional attribute created by the formulations/compositions of the disclosure and denoting that the microbe formulated into a shelf-stable composition can exist outside the rumen and under ambient conditions for a period of time that can be determined depending upon the particular formulation utilized, but in general means that the microbes can be formulated to exist in a composition that is stable under ambient conditions for at least a few days and generally at least one week. Accordingly, a “shelf-stable ruminant supplement” is a composition comprising one or more microbes of the disclosure, said microbes formulated in a composition, such that the composition is stable under ambient conditions for at least one week, meaning that the microbes comprised in the composition (e.g. whole cell, spore, or lysed cell) are able to impart one or more beneficial phenotypic properties to a ruminant when administered (e.g. increased milk yield, improved milk compositional characteristics, improved rumen health, and/or modulation of the rumen microbiome).

### Isolated Microbes

[0107] In some aspects, the present disclosure provides isolated microbes, including novel strains of microbes, presented in Tables 1, 3, and 14.

[0108] In other aspects, the present disclosure provides isolated whole microbial cultures of the microbes identified in Tables 1, 3, and 14. These cultures may comprise microbes at various concentrations.

[0109] In some aspects, the disclosure provides for utilizing one or more microbes selected from Tables 1, 3, and 14 to increase a phenotypic trait of interest in a ruminant.

[0110] In some embodiments, the disclosure provides isolated microbial species belonging to taxonomic families of Clostridiaceae, Ruminococcaceae, Lachnospiraceae, Acidaminococcaceae, Peptococcaceae, Porphyromonadaceae, Prevotellaceae, Neocallimastigaceae, Saccharomycetaceae, Phaeosphaeriaceae, Erysipelotrichia, Anaerolinaeceae, Atopobiaceae, Botryosphaeriaceae, Eubacteriaceae, Acholeplasmataceae, Succinivibrionaceae, Lactobacillaceae, Selenomonadaceae, Burkholderiaceae, and Streptococcaceae.

[0111] In further embodiments, isolated microbial species may be selected from genera of family Clostridiaceae, including Acetanaerobacterium, Acetivibrio, Acidaminobacter, Alkaliphilus, Anaerobacter, Anaerostipes, Anaerotruncus, Anoxynatronum, Bryantella, Butyricicoccus, Caldanaerocella, Caloramator, Caloranaerobacter, Caminicella, Candidatus Arthromitus, Clostridium, Coprobacillus, Dorea, Ethanologenbacterium, Faecalibacterium, Garciella, Guggenheimella, Hespellia, Linmingia, Natronincola, Oxobacter, Parasporobacterium, Sarcina, Soehngenia, Sporobacter, Subdoligranulum, Tepidibacter, Tepidimicrobium, Thermobrachium, Thermohalobacter, and Tindallia.

[0112] In further embodiments, isolated microbial species may be selected from genera of family Ruminococcaceae, including Ruminococcus, Acetivibrio, Sporobacter, Anaerofilium, Papillibacter, Oscillospira, Gemmiger, Faecalibacterium, Fastidiosipila, Anaerotruncus, Ethanolingenens, Acetanaerobacterium, Subdoligranulum, Hydrogenoanaerobacterium, and Candidadus soleaferrea.

[0113] In further embodiments, isolated microbial species may be selected from genera of family Lachnospiraceae, including Butyrivibrio, Roseburia, Lachnospira, Acetitomaculum, Coprococcus, Johnsonella, Catonella, Pseudobutyrivibrio, Syntrophococcus, Sporobacterium, Parasporobacterium, Lachnobacterium, Shuttleworthia, Dorea, Anaerostipes, Hespellia, Marvinbryantia, Oribacterium, Moryella, Blautia, Robinsoniella, Cellulosilyticum, Lachnoanaerobaculum, Stomatobaculum, Fusicatenibacter, Acetatifactor, and Eisenbergiella.

[0114] In further embodiments, isolated microbial species may be selected from genera of family Acidaminococcaceae, including Acidaminococcus, Phascolarctobacterium, Succiniclasticum, and Succinispira.

[0115] In further embodiments, isolated microbial species may be selected from genera of family Peptococcaceae, including Desulfotomaculum, Peptococcus, Desulfitobacterium, Syntrophobotulus, Dehalobacter, Sporotomaculum, Desulfosporosinus, Desulfonispora, Pelotomaculum, Thermincola, Cryptanaerobacter, Desulfitibacter, Candidatus Desulforudis, Desulfurispora, and Desulfitospora.

[0116] In further embodiments, isolated microbial species may be selected from genera of family Porphyromonadaceae, including Porphyromonas, Dysgonomonas, Tannerella, Odoribacter, Proteiniphilum, Petrimonas, Paludibacter, Parabacteroides, Bamesiella, Candidatus Vestibaculum, Butyricimonas, Macellibacteroides, and Coprobacter.

[0117] In further embodiments, isolated microbial species may be selected from genera of family Anaerolinaeceae including Anaerolinea, Bellilinea, Leptolinea, Levilinea, Longilinea, Ornatilinea, and Pelolinea.

[0118] In further embodiments, isolated microbial species may be selected from genera of family Atopobiaceae including Atopbium and Olsenella.

[0119] In further embodiments, isolated microbial species may be selected from genera of family Eubacteriaceae including Acetobacterium, Alkalibacter, Alkalibaculum, Aminicella, Anaerofustis, Eubacterium, Garciella, and Pseudoramibacter.

[0120] In further embodiments, isolated microbial species may be selected from genera of family Acholeplasmataceae including Acholeplasma.

[0121] In further embodiments, isolated microbial species may be selected from genera of family Succinivibrionaceae including Anaerobiospirillum, Ruminobacter, Succinatimonas, Succinimonas, and Succinivibrio.

[0122] In further embodiments, isolated microbial species may be selected from genera of family Lactobacillaceae including Lactobacillus, Paralactobacillus, Pediococcus, and Sharpea.

[0123] In further embodiments, isolated microbial species may be selected from genera of family Selenomonadaceae including Anaerovibrio, Centipeda, Megamonas, Mitsuokella, Pectinatus, Propionispira, Schwartzia, Selenomonas, and Zymophilus.

[0124] In further embodiments, isolated microbial species may be selected from genera of family Burkholderiaceae including Burkholderia, Chitinimonas, Cupriavidus, Lautropia, Limnobacter, Pandoraea, Paraburkholderia, Paucimonas, Polynucleobacter, Ralstonia, Thermothrix, and Wautersia.

[0125] In further embodiments, isolated microbial species may be selected from genera of family Streptococcaceae including Lactococcus, Lactovum, and Streptococcus.

[0126] In further embodiments, isolated microbial species may be selected from genera of family Anaerolinaeceae including Aestuariimicrobium, Arachnia, Auraticoccus, Brooklawnia, Friedmanniella, Granulicoccus, Luteococcus, Mariniluteicoccus, Microlunatus, Micropruina, Naumannella, Propionibacterium, Propionicicella, Propioniciclava, Propioniferax, Propionimicrobium, and Tessaracoccus.

[0127] In further embodiments, isolated microbial species may be selected from genera of family Prevotellaceae, including Paraprevotella, Prevotella, hallella, Xylanibacter, and Alloprevotella.

[0128] In further embodiments, isolated microbial species may be selected from genera of family Neocallimastigaceae, including Anaeromyces, Caecomyces, Cyllamyces, Neocallimastix, Orpinomyces, and Piromyces.

[0129] In further embodiments, isolated microbial species may be selected from genera of family Saccharomycetaceae, including Brettanomyces, Candida, Citeromyces, Cyniclomyces, Debaryomyces, Issatchenkia, Kazachstania (syn. Arxiozyma), Kluyveromyces, Komagataella, Kuraishia, Lachancea, Lodderomyces, Nakaseomyces, Pachysolen, Pichia, Saccharomyces, Spathaspora, Tetrapisispora, Vanderwaltozyma, Torulaspora, Williopsis, Zygosaccharomyces, and Zygotorulaspora.

[0130] In further embodiments, isolated microbial species may be selected from genera of family Erysipelotrichaceae, including Erysipelothrix, Solobacterium, Turicibacter, Faecalibaculum, Faecalicoccus, Faecalitalea, Holdemanella, Holdemania, Dielma, Eggerthia, Erysipelatoclostridium, Allobacterium, Breznakia, Bulleidia, Catenibacterium, Catenisphaera, and Coprobacillus.

[0131] In further embodiments, isolated microbial species may be selected from genera of family Phaeosphaeriaceae, including Barria, Bricookea, Carinispora, Chaetoplea, Eudarluca, Hadrospora, Isthmosporella, Katumotoa, Lautitia, Metameris, Mixtura, Neophaeosphaeria, Nodulosphaeria, Ophiosphaerella, Phaeosphaeris, Phaeosphaeriopsis, Setomelanomma, Stagonospora, Teratosphaeria, and Wilmia.

[0132] In further embodiments, isolated microbial species may be selected from genera of family Botryosphaeriaceae, including Amarenomyces, Aplosporella, Auerswaldiella, Botryosphaeria, Dichomera, Diplodia, Discochora, Dothidothia, Dothiorella, Fusicoccum, Granulodiplodia, Guignardia, Lasiodiplodia, Leptodothiorella, Leptodothiorella, Leptoguignardia, Macrophoma, Macrophomina, Nattrassia, Neodeightonia, Neofusicocum, Neoscytalidium, Otthia, Phaeobotryosphaeria, Phomatosphaeropsis, Phyllosticta, Pseudofusicoccum, Saccharata, Sivanesania, and Thyrostroma.

[0133] In further embodiments, isolated microbial species may be selected from genera of family Prevotellaceae, Bacteroidaceae, Synergistaceae, Porphyromonadaceae, Sphingomonadaceae, Aridibacter_kavangonensis, Spiroplasmataceae, Anaeroplasmataceae, Ruminococcaceae, Rikenellaceae, Lachnospiraceae, Deferribacteraceae, Hyphomicrobiaceae, Paenibacillaceae_1, Clostridiales_Incertae_Sedis_XIII, Flavobacteriaceae, Erysipelotrichaceae, Fibrobacteraceae, Pasteurellaceae, Chitinophagaceae, Spirochaetaceae, Acidaminococcaceae, Christensenellaceae, Staphylococcaceae, Clostridiaceae_1, Brab rhizobiaceae, Alcanivoracaceae, Succinivibrionaceae, Alteromonadaceae, Methylobacteriaceae, Cryomorphaceae, Lactobacillaceae, Beijerinckiaceae, Clostridiales_Incertae_Sedis_XII, Natranaerobiaceae, GpXII, Marinilabiliaceae, Anaerolineaceae, Flammeovirgaceae, Prolixibacteraceae, Vibrionaceae, Mycoplasmataceae, GpXI, Clostridiales_Incertae_Sedis_IV, Syntrophomonadaceae, Leuconostocaceae, Peptococcaceae_1, Streptophyta, GpXIII, Enterobacteriaceae, Rhodobacteraceae, Planococcaceae, Erythrobacteraceae, Piscirickettsiaceae, Campylobacteraceae, Heliobacteriaceae, Desulfovibrionaceae, and Microbacteriaceae.

[0134] In some embodiments, the disclosure provides isolated microbial species belonging to genera of: Prevotella, Bacteroides, Aminiphilus, Tannerella, Sphingomonas, Spiroplasma, Anaeroplasma, Oscillibacter, Alistipes, Clostridium_XIVa, Deferribacter, Devosia, Paenibacillus, Hydrogenoanaerobacterium, Anaerovorax, Lachnospiracea_incertae_sedis, Lutibacter, Ruminococcus, Blautia, Clostridium_III, Erysipelothrix, Fibrobacter, Faecalicoccus, Bamesiella, Aggregatibacter, Sinomicrobium, Syntrophococcus, Turicibacter, Chitinophaga, Treponema, Paludibacter, Gelidibacter, Succiniclasticum, Christensenella, Jeotgalicoccus, Proteiniclasticum, Brab_rhizobium, Proteiniphilum, Butyricimonas, Roseburia, Lachnobacterium, Kangiella, Succinivibrio, Glaciecola, Maribacter, Methylobacterium, Fluviicola, Staphylococcus, Lactobacillus, Anaerorhabdus, Clostridium IV, Methylocella, Parabacteroides, Salinimicrobium, Fusibacter, Zunongwangia, Natranaerobaculum, Solobacterium, Cellulosilyticum, Sporobacter, Saccharicrinis, Acetanaerobacterium, Ornatilinea, Butyrivibrio, Lachnoanaerobaculum, Wandonia, Sediminitomix, Pediococcus, Coprobacter, Meniscus, Vibrio, Mycoplasma, Aureibacter, Sphingomicrobium, Alkalitalea, Erysipelotrichaceae_incertae_sedis, Butyricicoccus, Shuttleworthia, Caldicoprobacter, Cnuella, Mogibacterium, Pseudoflavonifractor, Syntrophomonas, Frondibacter, Leuconostoc, Peptococcus, Anaerocella, Buchnera, Alkaliflexus, Stappia, Ureibacillus, Caloramator, Porphyrobacter, Sulfurivirga, b_sgonomonas, Ruminococcus2, Sulfurospirillum, Heliorestis, Desulfovibrio, Microbacterium, and Thermophagus.

[0135] In some embodiments, the disclosure provides isolated microbial species, selected from the group consisting of: Prevotella brevis, Bacteroides rodentium, Aminiphilus circumscriptus, Bacteroides plebeius, Tannerella forsythia, Sphingomonas mucosissima, Prevotella copri, Spiroplasma culicicola, Prevotella stercorea, Prevotella bryantii, Anaeroplasma bactoclasticum, Prevotella ruminicola, Oscillibacter valericigenes, Alistipes finegoldii, Clostridium fimetarium, Deferribacter thermophilus, Devosia neptuniae, Paenibacillus mendeihi, Hydrogenoanaerobacterium saccharovorans, Anaerovorax odorimutans, Eubacterium ruminantium, Lutibacter flavus, Ruminococcus flavefaciens, Blautia hansenii, Prevotella shahii, Spiroplasma taiwanense, Clostridium termitidis, Bacteroides coprocola, Bacteroides barnesiae, Erysipelothrix tonsillarum, Erysipelothrix rhusiopathiae, Clostridium glycyrrhizinilyticum, Fibrobacter succinogenes subsp. elongatus, Ruminococcus callidus, Clostridium polysaccharolyticum, Barnesiella viscericola, Aggregatibacter segnis, Sinomicrobium pectinilyticum, Syntrophococcus sucromutans, Clostridium aminophilum, Turicibacter sanguinis, Anaeroplasma abactoclasticum, Chitinophaga qingshengii, Treponema stenostreptum, Bacteroides uniformis, Prevotella oulorum, Paludibacter propionicigenes, Gelidibacter algens, Succiniclasticum ruminis, Prevotella multisaccharivorax, Christensenella minuta, Jeotgalicoccus huakuii, Proteiniclasticum ruminis, Prevotella albensis, Prevotella oryzae, Brab rhizobium pachyrhizi, Proteiniphilum acetatigenes, Anaeroplasma varium, Butyricimonas faecihominis, Bacteroides massiliensis, Roseburia hominis, Lachnobacterium bovis, Kangiella spongicola, Succinivibrio dextrinosolvens, Glaciecola punicea, Maribacter thermophilus, Methylobacterium jeotgali, Butyricimonas synergistica, Fluviicola taffensis, Staphylococcus rostri, Lactobacillus manihotivorans, Anaerorhabdus furcosa, Clostridium leptum, Methylocella tundrae, Parabacteroides distasonis, Salinimicrobium catena, Ruminococcus bromii, Fusibacter paucivorans, Zunongwangia mangrovi, Bacteroides coprophilus, Prevotella aurantiaca, Natranaerobaculum magadiense, Solobacterium moorei, Cellulosilyticum ruminicola, Sporobacter termitidis, Eubacterium siraeum, Eubacterium hallii, Treponema bryantii, Saccharicrinis fermentans, Acetanaerobacterium elongatum, Clostridium methylpentosum, Treponema pectinovorum, Ornatilinea apprima, Butyrivibrio hungatei, Clostridium xylanovorans, Lachnoanaerobaculum orale, Wandonia haliotis, Fibrobacter succinogenes subsp. succinogenes, Sediminitomix flava, Parabacteroides gordonii, Pediococcus pentosaceus, Parabacteroides merdae, Coprobacter fastidiosus, Meniscus glaucopis, Vibrio diazotrophicus, Mycoplasma penetrans, Prevotella corporis, Aureibacter tunicatorum, Eubacterium eligens, Clostridium bolteae, Lactobacillus delbrueckii subsp. sunkii, Eubacterium xylanophilum, Sphingomicrobium flavum, Alkalitalea saponilacus, Spiroplasma clarkii, Eubacterium dolichum, Butyricicoccus pullicaecorum, Alistipes shahii, Clostridium cellulosi, Salinimicrobium marinum, Fibrobacter intestinalis, Shuttleworthia satelles, Eubacterium ventriosum, Clostridium cellobioparum, Clostridium hungatei, Butyrivibrio proteoclasticus, Cnuella takakiae, Sphingomonas daechungensis, Mogibacterium neglectum, Roseburia inulinivorans, Pseudoflavonifractor capillosus, Bacteroides finegoldii, Syntrophomonas cellicola, Frondibacter aureus, Leuconostoc gelidum subsp. aenigmaticum, Pediococcus ethanolidurans, Lactobacillus saniviri, Paenibacillus taiwanensis, Peptococcus niger, Alistipes putredinis, Treponema denticola, Anaerocella delicata, Lactobacillus hominis, Alkaliflexus imshenetskii, Stappia indica, Ureibacillus thermosphaericus, Caloramator australicus, Spiroplasma platyhelix, Treponema caldarium, Caldicoprobacter guelmensis, Porphyrobacter sanguineus, Chitinophaga eiseniae, Sulfurivirga caldicuralii, b sgonomonas termitidis, Spiroplasma gladiatoris, Ruminococcus torques, Sulfurospirillum barnesii, Heliorestis daurensis, Desulfovibrio psychrotolerans, Ruminococcus albus, Paenibacillus typhae, Microbacterium pseudoresistens, Thermophagus xiamenensis, Eubacterium rectale, and Treponema zuelzerae.

[0136] In some embodiments, the disclosure provides isolated microbial species belonging to genera of: Clostridium, Ruminococcus, Roseburia, Hydrogenoanaerobacterium, Saccharofermentans, Papillibacter, Pelotomaculum, Butyricicoccus, Tannerella, Prevotella, Butyricimonas, Piromyces, Candida, Vrystaatia, Orpinomyces, Neocallimastix, and Phyllosticta. In further embodiments, the disclosure provides isolated microbial species belonging to the family of Lachnospiraceae, and the order of Saccharomycetales. In further embodiments, the disclosure provides isolated microbial species of Candida xylopsoci, Vrystaatia aloeicola, and Phyllosticta capitalensis.

[0137] In some embodiments, a microbe from the taxa disclosed herein are utilized to impart one or more beneficial properties or improved traits to milk in ruminants.

[0138] In some embodiments, the disclosure provides isolated microbial species, selected from the group consisting of: Clostridium, Ruminococcus, Roseburia, Hydrogenoanaerobacterium, Saccharofermentans, Papillibacter, Pelotomaculum, Butyricicoccus, Tannerella, Prevotella, Butyricimonas, Piromyces, Pichia, Candida, Vrystaatia, Orpinomyces, Neocallimastix, and Phyllosticta.

[0139] In some embodiments, the disclosure provides novel isolated microbial strains of species, selected from the group consisting of: Clostridium, Ruminococcus, Roseburia, Hydrogenoanaerobacterium, Saccharofermentans, Papillibacter, Pelotomaculum, Butyricicoccus, Tannerella, Prevotella, Butyricimonas, Piromyces, Pichia, Candida, Vrystaatia, Orpinomyces, Neocallimastix, Ruminococcus, and Phyllosticta. Particular novel strains of these aforementioned taxonomic groups can be found in Table 1, Table 3 and/or Table 14.

[0140] In some embodiments, the disclosure provides isolated microbial strains of Ruminococcus bovis. In some embodiments, the isolated microbial strain of Ruminococcus bovis comprises the 16S nucleic acid sequence of SEQ ID NO: 2108. In some embodiments, the isolated microbial strain of Ruminococcus bovis comprises the deposit accession number PTA-125917, NRRL B-67764, TSD-225, or NCTC 14479. In some embodiments, the isolated strain of Ruminococcus bovis comprises one or more mutations selected from the group consisting of: (a) a G→T substitution at position 297 of SEQ ID NO: 2109; (b) a CC→TA substitution at positions 301-302 of SEQ ID NO: 2111; (c) a T→G substitution at position 307 of SEQ ID NO: 2111; (d) a −A deletion at position 300 of SEQ ID NO: 2113; (e) a CCA→TTC substitution at positions 116-118 of SEQ ID NO: 2115; (f) a +T insertion between positions 105-106 of SEQ ID NO: 2117; (g) a C→T substitution at position 298 of SEQ ID NO: 2119; (h) a C→A substitution at position 298 of SEQ ID NO: 2121; and (i) a +AC insertion between positions 43-44 of SEQ ID NO: 2123. In some embodiments, the isolated strain of Ruminococcus bovis comprises a nucleic acid sequence selected from any one of SEQ ID NOs: 2110, 2112, 2114, 2116, 2118, 2120, 2122, or 2124.

[0141] In some embodiments, the present disclosure provides an orally deliverable composition for increasing milk production or improving milk compositional characteristics in a ruminant, comprising: (a) Ruminococcus bovis comprising one or more mutations selected from the group consisting of: (i) a G→T substitution at position 297 of SEQ ID NO: 2109; (ii) a CC→TA substitution at positions 301-302 of SEQ ID NO: 2111; (iii) a T→G substitution at position 307 of SEQ ID NO: 2111; (iv) a −A deletion at position 300 of SEQ ID NO: 2113; (v) a CCA→TTC substitution at positions 116-118 of SEQ ID NO: 2115; (vi) a +T insertion between positions 105-106 of SEQ ID NO: 2117; (vii) a C→T substitution at position 298 of SEQ ID NO: 2119; (viii) a C→A substitution at position 298 of SEQ ID NO: 2121; and (ix) a +AC insertion between positions 43-44 of SEQ ID NO: 2123; and (b) a carrier suitable for oral ruminant administration.

[0142] In some embodiments, the present disclosure provides an orally deliverable composition for increasing milk production or improving milk compositional characteristics in a ruminant, comprising: (a) Ruminococcus bovis comprising a nucleic acid sequence selected from any one of SEQ ID NOs: 2110, 2112, 2114, 2116, 2118, 2120, 2122, 2124, 4104, 4116, 4364, 4620, 4814, 4828, 4921, 4943, 4944, or 4945; and (b) a carrier suitable for oral ruminant administration.

[0143] Furthermore, the disclosure relates to microbes having characteristics substantially similar to that of a microbe identified in Table 1, 3 or 14.

[0144] The isolated microbial species, and novel strains of said species, identified in the present disclosure, are able to impart beneficial properties or traits to ruminant milk production. For instance, the isolated microbes described in Tables 1, 3 and 14, or consortia of said microbes, are able to increase total milk fat in ruminant milk. The increase can be quantitatively measured, for example, by measuring the effect that said microbial application has upon the modulation of total milk fat.

[0145] In some embodiments, the isolated microbial strains are microbes of the present disclosure that have been genetically modified. In some embodiments, the genetically modified or recombinant microbes comprise polynucleotide sequences which do not naturally occur in said microbes. In some embodiments, the microbes may comprise heterologous polynucleotides. In further embodiments, the heterologous polynucleotides may be operably linked to one or more polynucleotides native to the microbes.

[0146] In some embodiments, the heterologous polynucleotides may be reporter genes or selectable markers. In some embodiments, reporter genes may be selected from any of the family of fluorescence proteins (e.g., GFP, RFP, YFP, and the like), P3-galactosidase, luciferase. In some embodiments, selectable markers may be selected from neomycin phosphotransferase, hygromycin phosphotranferase, aminoglycoside adenyltransferase, dihydrofolate reductase, acetolactase synthase, bromoxynil nitrilase, t-glucuronidase, dihydrogolate reductase, and chloramphenicol acetyltranferase. In some embodiments, the heterologous polynucleotide may be operably linked to one or more promoter.

TABLE 5
Taxa (largely Genera) of the present disclosure not
known to have been utilized in animal agriculture

| | |
|---|---|
| Intestinimonas | Anaerolinea |
| Pseudobutyrivibrio | Olsenella |
| Eubacterium | Catenisphaera |
| Faecalibacterium | Solobacterium |
| Blautia | Ralsonia |
| Coprococcus | Casaltella |
| Anaeroplasma | Acholeplasma |
| Aminiphilus | Mitsuokella |
| Alistipes | Sharpea |
| Oscillibacter | Neocallimastix |
| Odoribacter | Pichia |
| Tannerella | Candida |
| Hydrogenoanaerobacterium | Orpinomyces |
| Succinivibrio | Sugiyamaella |
| Ruminobacter | Cyllamyces |
| Lachnospira | Caecomyces |
| Sinimarinibacterium | Tremella |
| Hydrogenoanaerobacterium | Turicibacter |
| Clostridium XIVa | Anaerolinea |
| Saccharofermentans | Piromyces |
| Butyricicoccus | Olsenella |
| Papillibacter | Clostridium XICa |
| Pelotomaculum | Erysipelotrichaceae |
| Lachnospiracea | Solobacterium |
| Anaeroplasma | Ralstonia |
| Clostridium | Eubacterium |
| Rikenella | Lachnobacterium |
| Tannerella | Acholeplasma |
| Howardella | Selenomonas |
| Butyricimonas | Sharpea |
| Succinivibrio | Phyllosticta |
| Ruminobacter | Candida xylopsoc |
| Syntrophococcus | Candida apicol |
| Pseudobutyrivibrio | Saccharomyces |
| Ascomycota | Candida rugos |

### Microbial Consortia

[0147] In some aspects, the disclosure provides microbial consortia comprising a combination of at least any two microbes selected from amongst the microbes identified in Tables 1, 3 and/or 14.

[0148] In certain embodiments, the consortia of the present disclosure comprise two microbes, or three microbes, or four microbes, or five microbes, or six microbes, or seven microbes, or eight microbes, or nine microbes, or ten or more microbes. Said microbes of the consortia are different microbial species, or different strains of a microbial species.

[0149] In some embodiments, the disclosure provides consortia, comprising: at least two isolated microbial species belonging to genera of: Clostridium, Ruminococcus, Roseburia, Hydrogenoanaerobacteriurn, Saccharofermentans, Papillibacter, Pelotomaculum, Butyricicoccus, Tannerella, Prevotella, Butyricimonas, Piromyces, Pichia, Candida, Vrystaatia, Orpinomyces, Neocallimastix, and Phyllosticta. Particular novel strains of species of these aforementioned genera can be found in Tables 1, 3 and/or 14.

[0150] In some embodiments, the disclosure provides consortia, comprising: at least two isolated microbial species, selected from the group consisting of species of the family of Lachnospiraceae, and the order of Saccharomycetales.

[0151] In particular aspects, the disclosure provides microbial consortia, comprising species as grouped in Tables 6-12. In one example, the letters A through I in Tables 6-12 represent a non-limiting selection of microbes of the present disclosure, defined as:
[0152] A=Strain designation Ascusb_5 (SEQ ID NO: 1) identified in Table 1;
[0153] B=Strain designation Ascusb_3138 (SEQ ID NO: 28) identified in Table 1;
[0154] C=Strain designation Ascusb_5 (SEQ ID NO: 2108) identified in Table 1;
[0155] D=Strain designation Ascusb_826 (SEQ ID NO: 2067) identified in Table 1;
[0156] E=Strain designation Ascusf_22 (SEQ ID NO: 33) identified in Table 1;
[0157] F=Strain designation Ascusf_23 (SEQ ID NO: 34) identified in Table 1;
[0158] G=Strain designation Ascusf_24 (SEQ ID NO: 35) identified in Table 1;
[0159] H=Strain designation Ascusf_45 (SEQ ID NO: 38) identified in Table 1; and
[0160] I=Strain designation Ascusf 15 (SEQ ID NO: 32) identified in Table 1.

[0161] In another example, the letters A through I in Tables 6-12 represent a non-limiting selection of microbes of the present disclosure, selected from the group consisting of Strain designation Ascusb_17 (SEQ ID NO: 4943), Ascusb_409 (SEQ ID NO: 4944), Ascusb_17848 (SEQ ID NO: 4945), Ascusb_18 (SEQ ID NO: 4104), Ascusb_126 (SEQ ID NO: 4828), Ascusb_51 (SEQ ID NO: 4364), Ascusb_64 (SEQ ID NO: 4620), Ascusb_299 (SEQ ID NO: 4921), Ascusb_341 (SEQ ID NO: 4814), and Ascusb_1785 (SEQ ID NO: 4116), all identified in Table 14.

TABLE 6
Eight and Nine Strain Consortia

| | | | | |
|---|---|---|---|---|
| A,B,C,D,E,F,G,H | A,B,C,D,E,F,G,I | A,B,C,D,E,F,H,I | A,B,C,D,E,G,H,I | A,B,C,D,F,G,H,I |
| A,B,D,E,F,G,H,I | A,C,D,E,F,G,H,I | B,C,D,E,F,G,H,I | A,B,C,D,E,F,G,H,I | A,B,C,E,F,G,H,I |

TABLE 7
Seven Strain Consortia

| | | | | | |
|---|---|---|---|---|---|
| A,B,C,D,E,F,G | A,B,C,D,E,F,H | A,B,C,D,E,F,I | A,B,C,D,E,G,H | A,B,C,D,E,G,I | A,B,C,D,E,H,I |
| A,B,C,D,F,G,H | A,B,C,D,F,G,I | A,B,C,D,F,H,I | A,B,C,D,G,H,I | A,B,C,E,F,G,H | A,B,C,E,F,G,I |
| A,B,C,E,F,H,I | A,B,C,E,G,H,I | A,B,C,F,G,H,I | A,B,D,E,F,G,H | A,B,D,E,F,G,I | A,B,D,E,F,H,I |
| A,B,D,E,G,H,I | A,B,D,F,G,H,I | A,B,E,F,G,H,I | A,C,D,E,F,G,H | A,C,D,E,F,G,I | A,C,D,E,F,H,I |
| A,C,D,E,G,H,I | A,C,D,F,G,H,I | A,C,E,F,G,H,I | A,D,E,F,G,H,I | B,C,D,E,F,G,H | B,C,D,E,F,G,I |
| B,C,D,E,F,H,I | B,C,D,E,G,H,I | B,C,D,F,G,H,I | B,C,E,F,G,H,I | B,D,E,F,G,H,I | C,D,E,F,G,H,I |

TABLE 8
Six Strain Consortia

| | | | | | | |
|---|---|---|---|---|---|---|
| A, B, C, D, E, F | A, B, C, D, E, G | A, B, C, D, E, H | A, B, C, D, E, I | A, B, C, D, F, G | A, B, C, D, F, H | A, B, C, D, F, I |
| A, B, C, D, G, H | A, B, C, D, G, I | A, B, C, D, H, I | A, B, C, E, F, G | A, B, C, E, F, H | A, B, C, E, F, I | A, B, C, E, G, H |
| A, B, C, E, G, I | A, B, C, E, H, I | A, B, C, F, G, H | A, B, C, F, G, I | A, B, C, F, H, I | A, B, C, G, H, I | A, B, D, E, F, G |
| A, B, D, E, F, H | A, B, D, E, F, I | A, B, D, E, G, H | A, B, D, E, G, I | A, B, D, E, H, I | A, B, D, F, G, H | A, B, D, F, G, I |
| D, E, F, G, H, I | C, E, F, G, H, I | A, B, D, F, H, I | A, B, D, G, H, I | A, B, E, F, G, H | A, B, E, F, G, I | A, B, E, F, H, I |
| A, B, E, G, H, I | A, B, F, G, H, I | A, C, D, E, F, G | A, C, D, E, F, H | A, C, D, E, F, I | A, C, D, E, G, H | A, C, D, E, G, I |
| A, C, D, E, H, I | A, C, D, F, G, H | A, C, D, F, G, I | A, C, D, F, H, I | A, C, D, G, H, I | A, C, E, F, G, H | A, C, E, F, G, I |
| A, C, E, F, H, I | A, C, E, G, H, I | A, C, F, G, H, I | A, D, E, F, G, H | A, D, E, F, G, I | A, D, E, F, H, I | A, D, E, G, H, I |
| A, D, F, G, H, I | A, E, F, G, H, I | B, C, D, E, F, G | B, C, D, E, F, H | B, C, D, E, F, I | B, C, D, E, G, H | B, C, D, E, G, I |
| B, C, D, E, H, I | B, C, D, F, G, H | B, C, D, F, G, I | B, C, D, F, H, I | B, C, D, G, H, I | B, C, E, F, G, H | B, C, E, F, G, I |
| B, C, E, F, H, I | B, C, E, G, H, I | B, C, F, G, H, I | B, D, E, F, G, H | B, D, E, F, G, I | B, D, E, F, H, I | B, D, E, G, H, I |
| B, D, F, G, H, I | B, E, F, G, H, I | C, D, E, F, G, H | C, D, E, F, G, I | C, D, E, F, H, I | C, D, E, G, H, I | C, D, F, G, H, I |

TABLE 9
Five Strain Consortia

| | | | | | | | |
|---|---|---|---|---|---|---|---|
| A, B, C, D, E | A, B, C, D, F | A, B, C, D, G | A, B, C, D, H | A, B, C, D, I | A, B, C, E, F | A, B, C, E, G | A, B, C, E, H |
| A, B, C, F, H | A, B, C, F, G | A, B, C, F, I | A, B, C, G, H | A, B, C, G, I | A, B, C, H, I | A, B, D, E, F | A, B, D, E, G |
| A, B, D, E, I | A, B, D, F, G | A, B, D, F, H | A, B, D, F, I | A, B, D, G, H | A, B, D, G, I | A, B, D, H, I | A, B, E, F, G |
| A, B, E, F, I | A, B, E, G, H | A, B, E, G, I | A, B, E, H, I | A, B, F, G, H | A, B, F, G, I | A, B, F, H, I | A, B, G, H, I |
| A, C, D, E, G | A, C, D, E, H | A, C, D, E, I | A, C, D, F, G | A, C, D, F, H | A, C, D, F, I | A, C, D, G, H | A, C, D, G, I |
| A, C, E, F, G | A, C, E, F, H | A, C, E, F, I | A, C, E, G, H | A, C, E, G, I | A, C, E, H, I | A, C, F, G, H | A, C, F, G, I |
| A, C, G, H, I | A, D, E, F, G | A, D, E, F, H | A, D, E, F, I | A, D, E, G, H | A, D, E, G, I | A, D, E, H, I | A, D, F, G, H |
| A, D, F, H, I | A, D, G, H, I | A, E, F, G, H | A, E, F, G, I | A, E, F, H, I | A, E, G, H, I | A, F, G, H, I | B, C, D, E, F |
| B, C, D, E, H | B, C, D, E, I | B, C, D, F, G | B, C, D, F, H | B, C, D, F, I | B, C, D, G, H | B, C, D, G, I | B, C, D, H, I |
| B, C, E, F, H | B, C, E, F, I | B, C, E, G, H | B, C, E, G, I | B, C, E, H, I | B, C, F, G, H | B, C, F, G, I | B, C, F, H, I |
| B, D, E, F, G | B, D, E, F, H | B, D, E, F, I | B, D, E, G, H | B, D, E, G, I | B, D, E, H, I | B, D, F, G, H | B, D, F, G, I |
| B, D, G, H, I | B, E, F, G, H | B, E, F, G, I | B, E, F, H, I | B, E, G, H, I | B, F, G, H, I | C, D, E, F, G | C, D, E, F, H |
| C, D, E, G, H | C, D, E, G, I | C, D, E, H, I | C, D, F, G, H | C, D, F, G, I | C, D, F, H, I | C, D, G, H, I | C, E, F, G, H |
| C, E, F, H, I | C, E, G, H, I | C, F, G, H, I | D, E, F, G, H | D, E, F, G, I | D, E, F, H, I | D, E, G, H, I | D, F, G, H, I |
| A, B, C, E, I | A, B, D, E, H | A, B, E, F, H | A, C, D, E, F | A, C, D, H, I | A, C, F, H, I | A, D, F, G, I | B, C, D, E, G |
| B, C, E, F, G | B, C, G, H, I | B, D, F, H, I | C, D, E, F, I | C, E, F, G, I | E, F, G, H, I | | |

TABLE 10
Four Strain Consortia

| | | | | | | | | |
|---|---|---|---|---|---|---|---|---|
| A, B, C, D | A, B, C, E | A, B, C, F | A, B, C, G | A, B, C, H | A, B, C, I | A, B, D, E | A, B, D, F | D, G, H, I |
| A, B, D, G | A, B, D, H | A, B, D, I | A, B, E, F | A, B, E, G | A, B, E, H | A, B, E, I | A, B, F, G | E, F, G, H |
| A, B, F, H | A, D, F, H | A, D, F, I | A, D, G, H | A, D, G, I | A, D, H, I | A, E, F, G | A, E, F, H | E, F, G, I |
| A, B, F, I | A, B, G, H | A, B, G, I | A, B, H, I | A, C, D, E | A, C, D, F | A, C, D, G | A, C, D, H | E, F, H, I |
| A, C, D, I | A, C, E, F | A, C, E, G | A, C, E, H | A, C, E, I | A, C, F, G | A, C, F, H | A, C, F, I | E, G, H, I |
| A, C, G, H | A, C, G, I | A, C, H, I | A, D, E, F | A, D, E, G | A, D, E, H | A, D, E, I | A, D, F, G | F, G, H, I |
| A, E, F, I | A, E, G, H | A, E, G, I | A, E, H, I | A, F, G, H | A, F, G, I | A, F, H, I | A, G, H, I | D, E, F, H |
| B, C, D, E | B, C, D, F | B, C, D, G | B, C, D, H | B, C, D, I | B, C, E, F | B, C, E, G | B, C, E, H | D, E, F, I |
| B, C, E, I | B, C, F, G | B, C, F, H | B, C, F, I | B, C, G, H | B, C, G, I | B, C, H, I | B, D, E, F | D, E, G, H |
| B, D, E, G | B, D, E, H | B, D, E, I | B, D, F, G | B, D, F, H | B, D, F, I | B, D, G, H | B, D, G, I | D, E, G, I |
| B, D, H, I | B, E, F, G | B, E, F, H | B, E, F, I | B, E, G, H | B, E, G, I | B, E, H, I | B, F, G, H | D, E, H, I |
| B, F, G, I | B, F, H, I | B, G, H, I | C, D, E, F | C, D, E, G | C, D, E, H | C, D, E, I | C, D, F, G | D, F, G, H |
| C, D, F, H | C, D, F, I | C, D, G, H | C, D, G, I | C, D, H, I | C, E, F, G | C, E, F, H | C, E, F, I | D, F, G, I |
| C, E, G, H | C, E, G, I | C, E, H, I | C, F, G, H | C, F, G, I | C, F, H, I | C, G, H, I | D, E, F, G | D, F, H, I |

TABLE 11
Three Strain Consortia

| | | | | | | | | | | |
|---|---|---|---|---|---|---|---|---|---|---|
| A, B, C | A, B, D | A, B, E | A, B, F | A, B, G | A, B, H | A, B, I | A, C, D | A, C, E | G, H, I | E, F, H |
| A, C, F | A, C, G | A, C, H | A, C, I | A, D, E | A, D, F | A, D, G | A, D, H | A, D, I | F, H, I | E, F, G |
| A, E, F | A, E, G | A, E, H | A, E, I | A, F, G | A, F, H | A, F, I | A, G, H | A, G, I | F, G, I | D, H, I |
| A, H, I | B, C, D | B, C, E | B, C, F | B, C, G | B, C, H | B, C, I | B, D, E | B, D, F | F, G, H | D, G, I |
| B, D, G | B, D, H | B, D, I | B, E, F | B, E, G | B, E, H | B, E, I | B, F, G | B, F, H | E, H, I | E, F, I |
| B, F, I | B, G, H | B, G, I | B, H, I | C, D, E | C, D, F | C, D, G | C, D, H | C, D, I | E, G, I | D, G, H |
| C, E, F | C, E, G | C, E, H | C, E, I | C, F, G | C, F, H | C, F, I | C, G, H | C, G, I | E, G, H | D, F, I |
| C, H, I | D, E, F | D, E, G | D, E, H | D, E, I | D, F, G | D, F, H | | | | |

TABLE 12
Two Strain Consortia

| | | | | | | | | | | | | | | | |
|---|---|---|---|---|---|---|---|---|---|---|---|---|---|---|---|
| A, B | A, C | A, D | A, E | A, F | A, G | A, H | A, I | B, C | B, D | B, E | B, F | B, G | B, H | B, I | C, D |
| C, E | C, F | C, G | C, H | C, I | D, E | D, F | D, G | D, H | D, I | E, F | E, G | E, H | E, I | F, G | F, H |
| F, I | G, H | G, I | H, I | | | | | | | | | | | | |

[0162] In some embodiments, the microbial consortia may be selected from any member group from Tables 6-12.

### Isolated Microbes—Source Material

[0163] The microbes of the present disclosure were obtained, among other places, at various locales in the United States from the gastrointestinal tract of cows.

### Isolated Microbes—Microbial Culture Techniques

[0164] The microbes of Tables 1, 3 and/or 14 were matched to their nearest taxonomic groups by utilizing classification tools of the Ribosomal Database Project (RDP) for 16s rRNA sequences and the User-friendly Nordic ITS Ectomycorrhiza (UNITE) database for ITS rRNA sequences. Examples of matching microbes to their nearest taxa may be found in Lan et al. (2012. PLOS one. 7(3):e32491), Schloss and Westcott (2011. Appl. Environ. Microbiol. 77(10):3219-3226), and Koljalg et al. (2005. New Phytologist. 166(3):1063-1068).

[0165] The isolation, identification, and culturing of the microbes of the present disclosure can be effected using standard microbiological techniques. Examples of such techniques may be found in Gerhardt, P. (ed.) Methods for General and Molecular Microbiology. American Society for Microbiology, Washington, D.C. (1994) and Lennette, E. H. (ed.) Manual of Clinical Microbiology, Third Edition. American Society for Microbiology, Washington, D.C. (1980), each of which is incorporated by reference.

[0166] Isolation can be effected by streaking the specimen on a solid medium (e.g., nutrient agar plates) to obtain a single colony, which is characterized by the phenotypic traits described hereinabove (e.g., Gram positive/negative, capable of forming spores aerobically/anaerobically, cellular morphology, carbon source metabolism, acid/base production, enzyme secretion, metabolic secretions, etc.) and to reduce the likelihood of working with a culture which has become contaminated.

[0167] For example, for microbes of the disclosure, biologically pure isolates can be obtained through repeated subculture of biological samples, each subculture followed by streaking onto solid media to obtain individual colonies or colony forming units. Methods of preparing, thawing, and growing lyophilized bacteria are commonly known, for example, Gherna, R. L. and C. A. Reddy. 2007. Culture Preservation, p 1019-1033. In C. A. Reddy, T. J. Beveridge, J. A. Breznak, G. A. Marzluf, T. M. Schmidt, and L. R. Snyder, eds. American Society for Microbiology, Washington, D.C., 1033 pages; herein incorporated by reference. Thus freeze dried liquid formulations and cultures stored long term at −70° C. in solutions containing glycerol are contemplated for use in providing formulations of the present disclosure.

[0168] The microbes of the disclosure can be propagated in a liquid medium under aerobic conditions, or alternatively anaerobic conditions. Medium for growing the bacterial strains of the present disclosure includes a carbon source, a nitrogen source, and inorganic salts, as well as specially required substances such as vitamins, amino acids, nucleic acids and the like. Examples of suitable carbon sources which can be used for growing the microbes include, but are not limited to, starch, peptone, yeast extract, amino acids, sugars such as glucose, arabinose, mannose, glucosamine, maltose, and the like; salts of organic acids such as acetic acid, fumaric acid, adipic acid, propionic acid, citric acid, gluconic acid, malic acid, pyruvic acid, malonic acid and the like; alcohols such as ethanol and glycerol and the like; oil or fat such as soybean oil, rice bran oil, olive oil, corn oil, sesame oil. The amount of the carbon source added varies according to the kind of carbon source and is typically between 1 to 100 gram(s) per liter of medium. Preferably, glucose, starch, and/or peptone is contained in the medium as a major carbon source, at a concentration of 0.1-5% (W/V). Examples of suitable nitrogen sources which can be used for growing the bacterial strains of the present disclosure include, but are not limited to, amino acids, yeast extract, tryptone, beef extract, peptone, potassium nitrate, ammonium nitrate, ammonium chloride, ammonium sulfate, ammonium phosphate, ammonia or combinations thereof. The amount of nitrogen source varies according to the type of nitrogen source, typically between 0.1 to 30 gram per liter of medium. The inorganic salts, potassium dihydrogen phosphate, dipotassium hydrogen phosphate, disodium hydrogen phosphate, magnesium sulfate, magnesium chloride, ferric sulfate, ferrous sulfate, ferric chloride, ferrous chloride, manganous sulfate, manganous chloride, zinc sulfate, zinc chloride, cupric sulfate, calcium chloride, sodium chloride, calcium carbonate, sodium carbonate can be used alone or in combination. The amount of inorganic acid varies according to the kind of the inorganic salt, typically between 0.001 to 10 gram per liter of medium. Examples of specially required substances include, but are not limited to, vitamins, nucleic acids, yeast extract, peptone, meat extract, malt extract, dried yeast and combinations thereof. Cultivation can be effected at a temperature, which allows the growth of the microbial strains, essentially, between 20° C. and 46° C. In some aspects, a temperature range is 30° C.-39° C. For optimal growth, in some embodiments, the medium can be adjusted to pH 6.0-7.4. It will be appreciated that commercially available media may also be used to culture the microbial strains, such as Nutrient Broth or Nutrient Agar available from Difco, Detroit, MI. It will be appreciated that cultivation time may differ depending on the type of culture medium used and the concentration of sugar as a major carbon source.

[0169] In some aspects, cultivation lasts between 24-96 hours. Microbial cells thus obtained are isolated using methods, which are well known in the art. Examples include, but are not limited to, membrane filtration and centrifugal separation. The pH may be adjusted using sodium hydroxide and the like and the culture may be dried using a freeze dryer, until the water content becomes equal to 4% or less. Microbial co-cultures may be obtained by propagating each strain as described hereinabove. In some aspects, microbial multi-strain cultures may be obtained by propagating two or more of the strains described hereinabove. It will be appreciated that the microbial strains may be cultured together when compatible culture conditions can be employed.

[0170] In some embodiments, the microorganisms of the present disclosure are subjected to a serial preservation challenge to improve microbial viability. In some embodiments, the microorganisms are subjected to a serial preservation challenge to improve stability. In some embodiments, the microorganisms of the present disclosure are subjected to at least one preservation challenge. In some embodiments, the microorganisms of the present disclosure are subjected to at least two, three, four, five, or more preservation challenges.

[0171] In some embodiments, the serial preservation method comprises: (a) subjecting a population of target microbial cells to a first preservation challenge to provide a first population of challenged microbial cells; (b) harvesting viable challenged microbial cells from the first population of challenged microbial cells to provide a first population of viable challenged microbial cells; (c) subjecting the first population of viable challenged microbial cells to a second preservation challenge to provide a second population of challenged microbial cells; (d) harvesting viable challenged microbial cells from the second population of challenged microbial cells to provide a second population of viable challenged microbial cells; (e) subjecting the second population of viable challenged microbial cells to a third preservation challenge to provide a third population of challenged microbial cells; (f) harvesting viable challenged microbial cells from the third population of challenged microbial cells to provide a third population of viable challenged microbial cells; (g) preserving the third population of viable challenged microbial cells to provide a population of preserved viability-enhanced microbial cells; and (h) preparing a product using the population of preserved viability-enhanced microbial cells.

[0172] In some embodiments, each of the preservation challenges are the same type of preservation challenge. For example, in some embodiments, the microorganisms of the present disclosure are subjected to two, three, four, five, or more preservation challenges before final preservation for storage and/or incorporation into a product, wherein each of the preservation challenges are of the same type. Types of preservation challenges include, but are not limited to, freeze drying/lyophilization, vitrification/glass formation, evaporation, foam formation, vaporization, cryopreservation, spray drying, adsorptive drying, extrusion, and fluid bed drying. Methods of microbial preservation are further described in PCT Application No. PCT/US2020/020311, herein incorporated by reference in its entirety.

[0173] In some embodiments, the preservation challenges are different types of preservation challenges. For example, in some embodiments, the microorganisms of the present disclosure are subjected to a first and a second preservation challenge, wherein the first and the second preservation challenges are different challenges types. For example, in some embodiments, the first preservation challenge is a cryopreservation challenge and the second preservation challenge is a freeze-drying preservation challenge.

[0174] In some embodiments, any one of the microorganisms listed in Table 1, 3 or 14 may be subjected to serial preservation challenge. In some embodiments, a microorganism comprising a 16S nucleic acid sequence with at least 95% sequence identity to SEQ ID NOs: 1-30, 2045-2103, 2108, or 2125-4945 is subjected to serial preservation challenge. In some embodiments, a microorganism comprising an ITS nucleic acid sequence with at least 95% sequence identity to SEQ ID NOs: 31-60 and 2104-2107 is subjected to serial preservation challenge.

[0175] In some embodiments, serial preservation results in one or more mutations in the genome of a microorganism. In some embodiments, serial preservation results in one or more mutations in the genome of any one of the microorganisms listed in Table 1, 3 or 14. In some embodiments, serial preservation results in one or more mutations in a microorganism comprising a 16S nucleic acid sequence with at least 95% sequence identity to SEQ ID NOs: 1-30, 2045-2103, 2108, or 2125-4945. In some embodiments, serial preservation results in one or more mutations in a microorganism comprising an ITS nucleic acid sequence with at least 95% sequence identity to SEQ ID NOs: 31-60 and 2104-2107.

[0176] In some embodiments, serial preservation results in one or more mutations in Ruminococcus bovis comprising a 16S nucleic acid sequence of SEQ ID NO: 2108. In some embodiments, the one or more mutations are located in the whole genome of Ruminococcus bovis comprising a 16S nucleic acid sequence of SEQ ID NO: 2108. In some embodiments, the one or mutations are not located in the 16S nucleic acid sequence of SEQ ID NO: 2108 of Ruminococcus bovis. Illustrative mutations in the whole genome of Ruminococcus bovis (SEQ ID NO: 2108) following serial preservation challenge are shown in Table 13 below and further described in Example 3 and Table 18. The mutations in Table 13 are in bold and underlined.

TABLE 13
Illustrative mutations following serial preservation in Ruminococcus bovis

| | Ruminococcus bovis | Ruminococcus bovis |
|---|---|---|
| | (SEQ ID NO: 2108) | (SEQ ID NO: 2108) |
| | Before Serial Preservation | After Serial Preservation |
| Mutation 1 | GCACCAAATGCAAAGGTATATTTGAT | GCACCAAATGCAAAGGTATATTTGATT |
| Melibiose | TCTTGCAGGAATCTTGCCGTCAAGTC | CTTGCAGGAATCTTGCCGTCAAGTCTG |
| carrier protein, | TGCGTTCAGAACTGCGTTTCATAAAA | CGTTCAGAACTGCGTTTCATAAAAAAT |
| GalR-LacI | AATCCTCCTTAAATATAAAAAATGAA | CCTCCTTAAATATAAAAAATGAAACTA |
| family of | ACTAACCGTACAAAATGCATAAAAGA | ACCGTACAAAATGCATAAAAGAAATTA |
| transcriptional | AATTAATATTATTAATTATTAATATG | ATATTATTAATTATTAATATGCTTTTT |
| regulators | CTTTTTGCTTATCTGTTAACTAAATT | GCTTATCTGTTAACTAAATTATATGTT |
| | ATATGTTTTGTTTCATAAAAAGTCAA | TTGTTTCATAAAAAGTCAATATATTTA |
| | TATATTTAGTAAACAAAATTAAAGTT | GTAAACAAAATTAAAGTTTATCTATTT |
| | TATCTATTTTTCACTAAACAACCCTT | TTCACTAAACAACCCTTGCGTATTTAG |
| | GCGTATTTAGTAAATATTCACTATAA | TAAATATTCACTATAATAAGGGTAGAT |
| | TAAGGGTAGAG (SEQ ID NO: | (SEQ ID NO: 2110) |
| | 2109) | |
| Mutations 2-3 | TTTCACTCAATAACTGCATTGGACTT | TTTCACTCAATAACTGCATTGGACTTT |
| Hypothetical | TTGTATTCAAGTGTTCTCATTGTCTT | TGTATTCAAGTGTTCTCATTGTCTTGT |
| protein | GTTATTACTCCATTCTAAATGTCCTT | TATTACTCCATTCTAAATGTCCTTTTA |
| (integrase) | TTAACTTTGTATTTAATTCTTCAATA | ACTTTGTATTTAATTCTTCAATATTTT |
| | TTTTTGAATGTTTCCCAATCATAGAA | TGAATGTTTCCCAATCATAGAAATATC |
| | ATATCTTTGGTCGTTTCTATGACTTC | TTTGGTCGTTTCTATGACTTCTTTCTA |
| | TTTCTACCTTCCCATTGTGCCAAGGT | CCTTCCCATTGTGCCAAGGTGTTCGTG |
| | GTTCGTGGTGGTATTAATTTATGATT | GTGGTATTAATTTATGATTTATACCTA |
| | TATACCTAATTTGTTCAATTCTATTT | ATTTGTTCAATTCTATTTCAAAAGGAC |
| | CAAAAGGACTTTTCACTTCACTGCTT | TTTTCACTTCACTGCTTTGATATTTAT |
| | TGATATTTATATGTGAACTCTCTTCC | ATGTGAACTCTCTTCCGTTATCTGTTT |
| | GTTATCTGTTTGAACCGTCTT (SEQ | GAATAGTCTG (SEQ ID NO: 2112) |
| | ID NO: 2111) | |
| Mutation 4 | TATTCTCTAAAAGAAAATAAATTTGA | TATTCTCTAAAAGAAAATAAATTTGAA |
| Phospho- | ACAATCATACAAATTACAAAAATGAA | CAATCATACAAATTACAAAAATGAAAT |
| mannomutase | ATTTTCTGTTCTGGAATAAAAAGACC | TTTCTGTTCTGGAATAAAAAGACCATA |
| | ATAAAAGCACCGAAAAAGCCCATCAG | AAAGCACCGAAAAAGCCCATCAGAATG |
| | AATGGGCTTTTCTTTATGTTATAACC | GGCTTTTCTTTATGTTATAACCGACTA |
| | GACTAAAAATAAGTAAAAATAAAATC | AAAATAAGTAAAAATAAAATCAAAAAA |
| | AAAAAATTTTAAAAAAAACTCTTTAC | TTTTAAAAAAAACTCTTTACAATACTA |
| | AATACTAAAAATAGGTGAAATTATAT | AAAATAGGTGAAATTATATACTTATTT |
| | ACTTATTTTTATTGTATTGAACTTTG | TTATTGTATTGAACTTTGTTATATTGT |
| | TTATATTGTATAATAGTTTTAGAAAA | ATAATAGTTTTAGAAAATTAATTTAAG |
| | TTAATTTAAGGGGTATATTTTATGCT | GGGTATATTTTATGCTTGATAATTTTT |
| | TGATAATTTTTATAA (SEQ ID NO: | AT-A (SEQ ID NO: 2114) |
| | 2113) | |
| Mutation 5 | CGCCCCAAGAATGATAGTGTTTGCGT | CGCCCCAAGAATGATAGTGTTTGCGTT |
| Hypothetical | TTTTTACTAAAATTCCGTTTTAATTC | TTTTACTAAAATTCCGTTTTAATTCTC |
| protein | TCTGCTGATTGTAGAAGGACTTCGTT | TGCTGATTGTAGAAGGACTTCGTTCAA |
| (transposase) | CAAGTATTTTTGCAATTTTTCTTATG | GTATTTTTGCAATTTTTCTTATGCTAT |
| | CTATATCCTTTCCA (SEQ ID NO: | ATCCTTTTTC (SEQ ID NO: 2116) |
| | 2115) | |
| Mutation 6 | TTACTAAATATTTTACATGTGCGCCC | TTACTAAATATTTTACATGTGCGCCCC |
| Hypothetical | CAAGAATGATAGTGTTTGCGTTTTTT | AAGAATGATAGTGTTTGCGTTTTTTAC |
| protein | ACTAAAATTCCGTTTTAATTCTCTGC | TAAAATTCCGTTTTAATTCTCTGCTGA |
| (transposase) | TGATTGTAGAAGGACTTCGTTCAAGT | TTGTAGAAGGACTTCGTTCAAGTATT |
| | A-T (SEQ ID NO: 2117) | (SEQ ID NO: 2118) |
| Mutation 7 | TAATCAGATTGAACGCGATATCAATT | TAATCAGATTGAACGCGATATCAATTC |
| Hypothetical | CCGAAAATGCCCCGAATGTTGTTAAG | CGAAAATGCCCCGAATGTTGTTAAGGA |
| protein | GATTACACAAGCAACGCGAAAATCAA | TTACACAAGCAACGCGAAAATCAAAAT |
| | AATCTCTCCGCTGGGTATCTCTCTTA | CTCTCCGCTGGGTATCTCTCTTACGGG |
| | CGGGCGAGTGTGATGAGAAATATGAC | CGAGTGTGATGAGAAATATGACAAGCA |
| | AAGCAAATGCCGGATTGGGGCAGTCG | AATGCCGGATTGGGGCAGTCGCTGCTT |
| | CTGCTTTGAGATTCCCGACACAGACG | TGAGATTCCCGACACAGACGGCAAATC |
| | GCAAATCAAAGGTAACAATGGATGAC | AAAGGTAACAATGGATGACGGAACAGT |
| | GGAACAGTTTATTATATCCTTGTAAA | TTATTATATCCTTGTAAACGAGGGCGG |
| | CGAGGGCGGCGAGCGCAGGACAGACG | CGAGCGCAGGACAGACGACAGCGGCGT |
| | ACAGCGGCGTTTTCCATGAGAATGCA | TTTCCATGAGAATGCACAGCTTCAATA |
| | CAGCTTCAATAC (SEQ ID NO: | T (SEQ ID NO: 2120) |
| | 2119) | |
| Mutation 8 | AAAAGGTACTGCACCATTTACTTTGT | AAAAGGTACTGCACCATTTACTTTGTT |
| Excinuclease | TAGATTATTTTCCAAAGGACTTTCTG | AGATTATTTTCCAAAGGACTTTCTGCT |
| ABC subunit B | CTTTTTGTTGATGAAAGCCATGTTAC | TTTTGTTGATGAAAGCCATGTTACTTT |
| | TTTACCTCAGGTTAGAGGTATGTATG | ACCTCAGGTTAGAGGTATGTATGGTGG |
| | GTGGTAACCTTTCAAGAAAGAAAAGT | TAACCTTTCAAGAAAGAAAAGTCTTAT |
| | CTTATTGATTATGGCTTTAGATTACC | TGATTATGGCTTTAGATTACCGTCAGC |
| | GTCAGCATATGACAACCGTCCTTTAA | ATATGACAACCGTCCTTTAAATTTTGA |
| | ATTTTGATGAATTTTATGATAGAATA | TGAATTTTATGATAGAATAAATCAAGT |
| | AATCAAGTCTGCTTTGTTTCAGCAAC | CTGCTTTGTTTCAGCAACACCGGGCGA |
| | ACCGGGCGACTTAGAACTTGAAAAGA | CTTAGAACTTGAAAAGAGCAGTGTTGT |
| | GCAGTGTTGTTGCAGAACAAATTATC | TGCAGAACAAATTATCCGTCCAACAGG |
| | CGTCCAACAGGC (SEQ ID NO: | A (SEQ ID NO: 2122) |
| | 2121) | |
| Mutation 9 | TGCCACAAAAAATATAAATATATAGG | TGCCACAAAAAATATAAATATATAGGG |
| Hypothetical | GGCAAAATTACAACTAA- | GCAAAATTACAACTAAACACACACCCA |
| protein | ACACACCCAAATAATCAAGACTTGCT | AATAATCAAGACTTGCTCTACTTGTAA |
| (stage II | CTACTTGTAAAATCAGTTGGAAATAA | AATCAGTTGGAAATAAAAAGTCAAAGG |
| sporulation | AAAGTCAAAGGACTTTTTAAATTCTA | ACTTTTTAAATTCTAAATCGGTATTTA |
| protein) | AATCGGTATTTACCCCAAAATATATA | CCCCAAAATATATACCCAGAATAAAAC |
| | CCCAGAATAAAACCTACTAAAATTGA | CTACTAAAATTGAAATAAGAAACATAG |
| | AATAAGAAACATAGTAAAGATACCGT | TAAAGATACCGTATC (SEQ ID NO: |
| | ATC (SEQ ID NO: 2123) | 2124) |

[0177] In some embodiments, serial preservation results in one or more mutations in Ruminococcus bovis comprising a 16S nucleic acid sequence of SEQ ID NO: 2108. In some embodiments, the one or more mutations is a G→T substitution at position 297 of SEQ ID NO: 2109. In some embodiments, the one or more mutations is a CC→TA substitution at positions 301-302 of SEQ ID NO: 2111. In some embodiments, the one or more mutations is a T→G substitution at position 307 of SEQ ID NO: 2111. In some embodiments, the one or more mutations is a −A deletion at position 300 of SEQ ID NO: 2113. In some embodiments, the one or more mutations is a CCA→TTC substitution at positions 116-118 of SEQ ID NO: 2115. In some embodiments, the one or more mutations is a +T insertion between positions 105-106 of SEQ ID NO: 2117. In some embodiments, the one or more mutations is a C→T substitution at position 298 of SEQ ID NO: 2119. In some embodiments, the one or more mutations is a C→A substitution at position 298 of SEQ ID NO: 2121. In some embodiments, the one or more mutations is a +AC insertion between positions 43-44 of SEQ ID NO: 2123.

[0178] In some embodiments, serial preservation of the microorganisms of the present disclosure results in an increase in microbial viability of at least 5%. In other words, the viability of the population of microbes present at the conclusion of the serial preservation challenges is increased by at least 5% compared to the viability of the population of microbes that were present prior to any preservation challenges. In some embodiments, serial preservation of a microbial culture results in an increase in microbial viability between about 5% and about 30%, about 5% and about 25%, about 5% and about 20%, about 5% and about 15%, about 5% and about 10%, about 10% and about 30%, about 15% and about 30%, about 20% and about 30%, or about 25% and about 30%. In some embodiments, serial preservation of a microbial culture results in an increase in microbial viability between about 10% and about 30%, about 15% and about 30%, about 20% and about 30%, about 25% and about 30%, about 10% and about 25%, about 10% and about 20%, or about 10% and about 15%. In some embodiments, serial preservation of a microbial culture results in an increase in microbial viability of at least 6%, 7%, 8%, 9%, 10%, 11%, 12%, 13%, 14%, 15%, 16%, 17%, 18%, 19%, 20%, 21%, 22%, 23%, 24%, 25%, 26%, 27%, 28%, 29%, 30% or more.

[0179] In some embodiments, serial preservation of the microorganisms of the present disclosure results in an increase in microbial stability of at least 5%. In other words, the stability of the population of microbes present at the conclusion of the serial preservation challenges is increased by at least 5% compared to the stability of the population of microbes that were present prior to any preservation challenges. In some embodiments, serial preservation of a microbial culture results in an increase in stability between about 5% and about 30%, about 5% and about 25%, about 5% and about 20%, about 5% and about 15%, about 5% and about 10%, about 10% and about 30%, about 15% and about 30%, about 20% and about 30%, or about 25% and about 30%. In some embodiments, serial preservation of a microbial culture results in an increase in stability between about 10% and about 30%, about 15% and about 30%, about 20% and about 30%, about 25% and about 30%, about 10% and about 25%, about 10% and about 20%, or about 10% and about 15%. In some embodiments, serial preservation of a microbial culture results in an increase in stability of at least 6%, 7%, 8%, 9%, 10%, 11%, 12%, 13%, 14%, 15%, 16%, 17%, 18%, 19%, 20%, 21%, 22%, 23%, 24%, 25%, 26%, 27%, 28%, 29%, 30% or more.

### Isolated Microbes—Microbial Strains

[0180] Microbes can be distinguished into a genus based on polyphasic taxonomy, which incorporates all available phenotypic and genotypic data into a consensus classification (Vandamme et al. 1996. Polyphasic taxonomy, a consensus approach to bacterial systematics. Microbiol Rev 1996, 60:407-438). One accepted genotypic method for defining species is based on overall genomic relatedness, such that strains which share approximately 70% or more relatedness using DNA-DNA hybridization, with 5° C. or less ΔTₘ (the difference in the melting temperature between homologous and heterologous hybrids), under standard conditions, are considered to be members of the same species. Thus, populations that share greater than the aforementioned 70% threshold can be considered to be variants of the same species. Another accepted genotypic method for defining species is to isolate marker genes of the present disclosure, sequence these genes, and align these sequenced genes from multiple isolates or variants. The microbes are interpreted as belonging to the same species if one or more of the sequenced genes share at least 97% sequence identity.

[0181] The 16S or 18S rRNA sequences or ITS sequences are often used for making distinctions between species and strains, in that if one of the aforementioned sequences share less than a specified percent sequence identity from a reference sequence, then the two organisms from which the sequences were obtained are said to be of different species or strains.

[0182] Thus, one could consider microbes to be of the same species, if they share at least 80%, 85%, 90%, 95%, 97%, 98%, or 99% sequence identity across the 16S or 18S rRNA sequence, or the ITS1 or ITS2 sequence.

[0183] Further, one could define microbial strains of a species, as those that share at least 80%, 85%, 90%, 95%, 97%, 98%, or 99% sequence identity across the 16S or 18S rRNA sequence, or the ITS1 or ITS2 sequence.

[0184] In one embodiment, microbial strains of the present disclosure include those that comprise polynucleotide sequences that share at least 70%, 75%, 80%, 81%, 82%, 83%, 84%, 85%, 86%, 87%, 88%, 89%, 90%, 91%, 92%, 93%, 94%, 95%, 96%, 97%, 98%, 99% or 100% sequence identity with any one of SEQ ID NOs:1, 2, 3, 4, 5, 6, 7, 8, 9, 10, 11, 12, 13, 14, 15, 16, 17, 18, 19, 20, 21, 22, 23, 24, 25, 26, 27, 28, 39, 30, 31, 32, 33, 34, 35, 36, 37, 38, 39, 40, 41, 42, 43, 44, 45, 46, 47, 48, 49, 50, 51, 52, 53, 54, 55, 56, 57, 58, 59, 60, 2045, 2046, 2047, 2048, 2049, 2050, 2051, 2052, 2053, 2054, 2055, 2056, 2057, 2058, 2059, 2060, 2061, 2062, 2063, 2064, 2065, 2066, 2067, 2068, 2069, 2070, 2071, 2072, 2073, 2074, 2075, 2076, 2077, 2078, 2079, 2080, 2081, 2082, 2083, 2084, 2085, 2086, 2087, 2088, 2089, 2090, 2091, 2092, 2093, 2094, 2095, 2096, 2097, 2098, 2099, 2100, 2101, 2102, 2103, 2104, 2105, 2106, 2107, 2108, and 2125-4945. In a further embodiment, microbial strains of the present disclosure include those that comprise polynucleotide sequences that share at least 70%, 75%, 80%, 81%, 82%, 83%, 84%, 85%, 86%, 87%, 88%, 89%, 90%, 91%, 92%, 93%, 94%, 95%, 96%, 97%, 98%, 99% or 100% sequence identity with any one of SEQ ID NOs:1-4945.

[0185] In one embodiment, microbial strains of the present disclosure include those that comprise polynucleotide sequences that share at least 97%, 97.1%, 97.2%, 97.3%, 97.4%, 97.5%, 97.6%, 97.7%, 97.8%, 97.9%, 98%, 98.1%, 98.2%, 98.3%, 98.4%, 98.5%, 98.6%, 98.7%, 98.8%, 98.9%, 99%, 99.1%, 99.2%, 99.3%, 99.4%, 99.5%, 99.6%, 99.7%, 99.8%, 99.9%, or 100% sequence identity with any one of SEQ ID NOs:1, 2, 3, 4, 5, 6, 7, 8, 9, 10, 11, 12, 13, 14, 15, 16, 17, 18, 19, 20, 21, 22, 23, 24, 25, 26, 27, 28, 39, 30, 31, 32, 33, 34, 35, 36, 37, 38, 39, 40, 41, 42, 43, 44, 45, 46, 47, 48, 49, 50, 51, 52, 53, 54, 55, 56, 57, 58, 59, 60, 2045, 2046, 2047, 2048, 2049, 2050, 2051, 2052, 2053, 2054, 2055, 2056, 2057, 2058, 2059, 2060, 2061, 2062, 2063, 2064, 2065, 2066, 2067, 2068, 2069, 2070, 2071, 2072, 2073, 2074, 2075, 2076, 2077, 2078, 2079, 2080, 2081, 2082, 2083, 2084, 2085, 2086, 2087, 2088, 2089, 2090, 2091, 2092, 2093, 2094, 2095, 2096, 2097, 2098, 2099, 2100, 2101, 2102, 2103, 2104, 2105, 2106, 2107, 2108, and 2125-4945.

[0186] Comparisons may also be made with 23S rRNA sequences against reference sequences.

[0187] Unculturable microbes often cannot be assigned to a definite species in the absence of a phenotype determination, the microbes can be given a candidatus designation within a genus provided their 16S or 18S rRNA sequences or ITS sequences subscribes to the principles of identity with known species.

[0188] One approach is to observe the distribution of a large number of strains of closely related species in sequence space and to identify clusters of strains that are well resolved from other clusters. This approach has been developed by using the concatenated sequences of multiple core (house-keeping) genes to assess clustering patterns, and has been called multilocus sequence analysis (MLSA) or multilocus sequence phylogenetic analysis. MLSA has been used successfully to explore clustering patterns among large numbers of strains assigned to very closely related species by current taxonomic methods, to look at the relationships between small numbers of strains within a genus, or within a broader taxonomic grouping, and to address specific taxonomic questions. More generally, the method can be used to ask whether bacterial species exist—that is, to observe whether large populations of similar strains invariably fall into well-resolved clusters, or whether in some cases there is a genetic continuum in which clear separation into clusters is not observed.

[0189] In order to more accurately make a determination of genera, a determination of phenotypic traits, such as morphological, biochemical, and physiological characteristics are made for comparison with a reference genus archetype. The colony morphology can include color, shape, pigmentation, production of slime, etc. Features of the cell are described as to shape, size, Gram reaction, extracellular material, presence of endospores, flagella presence and location, motility, and inclusion bodies. Biochemical and physiological features describe growth of the organism at different ranges of temperature, pH, salinity and atmospheric conditions, growth in presence of different sole carbon and nitrogen sources. One of ordinary skill in the art would be reasonably apprised as to the phenotypic traits that define the genera of the present disclosure.

[0190] In one embodiment, the microbes taught herein were identified utilizing 16S rRNA gene sequences and ITS sequences. It is known in the art that 16S rRNA contains hypervariable regions that can provide species/strain-specific signature sequences useful for bacterial identification, and that ITS sequences can also provide species/strain-specific signature sequences useful for fungal identification.

[0191] Phylogenetic analysis using the rRNA genes and/or ITS sequences are used to define “substantially similar” species belonging to common genera and also to define “substantially similar” strains of a given taxonomic species. Furthermore, physiological and/or biochemical properties of the isolates can be utilized to highlight both minor and significant differences between strains that could lead to advantageous behavior in ruminants.

[0192] Compositions of the present disclosure may include combinations of fungal spores and bacterial spores, fungal spores and bacterial vegetative cells, fungal vegetative cells and bacterial spores, fungal vegetative cells and bacterial vegetative cells. In some embodiments, compositions of the present disclosure comprise bacteria only in the form of spores. In some embodiments, compositions of the present disclosure comprise bacteria only in the form of vegetative cells. In some embodiments, compositions of the present disclosure comprise bacteria in the absence of fungi. In some embodiments, compositions of the present disclosure comprise fungi in the absence of bacteria.

[0193] Bacterial spores may include endospores and akinetes. Fungal spores may include statismospores, ballistospores, autospores, aplanospores, zoospores, mitospores, megaspores, microspores, meiospores, chlamydospores, urediniospores, teliospores, oospores, carpospores, tetraspores, sporangiospores, zygospores, ascospores, basidiospores, ascospores, and asciospores.

[0194] In some embodiments, spores of the composition germinate upon administration to animals of the present disclosure. In some embodiments, spores of the composition germinate only upon administration to animals of the present disclosure.

### Microbial Compositions

[0195] In some embodiments, the microbes of the disclosure are combined into microbial compositions.

[0196] In some embodiments, the microbial compositions include ruminant feed, such as cereals (barley, maize, oats, and the like); starches (tapioca and the like); oilseed cakes; and vegetable wastes. In some embodiments, the microbial compositions include vitamins, minerals, amino acids, enzymes, trace elements, emulsifiers, aromatizing products, binders, colorants, odorants, thickening agents, and the like. In some embodiments, the microbial compositions are combined with medicines or vaccines.

[0197] In some embodiments, the microbial compositions of the present disclosure are solid. Where solid compositions are used, it may be desired to include one or more carrier materials including, but not limited to: mineral earths such as silicas, talc, kaolin, limestone, chalk, clay, dolomite, diatomaceous earth; calcium sulfate; magnesium sulfate; magnesium oxide; products of vegetable origin such as cereal meals, tree bark meal, wood meal, and nutshell meal.

[0198] In some embodiments, the microbial compositions of the present disclosure are liquid. In further embodiments, the liquid comprises a solvent that may include water or an alcohol, and other animal-safe solvents. In some embodiments, the microbial compositions of the present disclosure include binders such as animal-safe polymers, carboxymethylcellulose, starch, polyvinyl alcohol, and the like.

[0199] In some embodiments, the microbial compositions of the present disclosure comprise thickening agents such as silica, clay, natural extracts of seeds or seaweed, synthetic derivatives of cellulose, guar gum, locust bean gum, alginates, and methylcelluloses. In some embodiments, the microbial compositions comprise anti-settling agents such as modified starches, polyvinyl alcohol, xanthan gum, and the like.

[0200] In some embodiments, the microbial compositions of the present disclosure comprise colorants including organic chromophores classified as nitroso; nitro; azo, including monoazo, bisazo and polyazo; acridine, anthraquinone, azine, diphenylmethane, indamine, indophenol, methine, oxazine, phthalocyanine, thiazine, thiazole, triarylmethane, xanthene. In some embodiments, the microbial compositions of the present disclosure comprise trace nutrients such as salts of iron, manganese, boron, copper, cobalt, molybdenum and zinc.

[0201] In some embodiments, the microbial compositions of the present disclosure comprise an animal-safe virucide or nematicide.

[0202] In some embodiments, microbial compositions of the present disclosure comprise saccharides (e.g., monosaccharides, disaccharides, trisaccharides, polysaccharides, oligosaccharides, and the like), polymeric saccharides, lipids, polymeric lipids, lipopolysaccharides, proteins, polymeric proteins, lipoproteins, nucleic acids, nucleic acid polymers, silica, inorganic salts and combinations thereof. In a further embodiment, microbial compositions comprise polymers of agar, agarose, gelrite, gellan gumand the like. In some embodiments, microbial compositions comprise plastic capsules, emulsions (e.g., water and oil), membranes, and artificial membranes. In some embodiments, emulsions or linked polymer solutions may comprise microbial compositions of the present disclosure. See Harel and Bennett (U.S. Pat. No. 8,460,726B2).

[0203] In some embodiments, microbial compositions of the present disclosure occur in a solid form (e.g., dispersed lyophilized spores) or a liquid form (microbes interspersed in a storage medium).

[0204] In some embodiments, microbial compositions of the present disclosure comprise one or more preservatives. The preservatives may be in liquid or gas formulations. The preservatives may be selected from one or more of monosaccharide, disaccharide, trisaccharide, polysaccharide, acetic acid, ascorbic acid, calcium ascorbate, erythorbic acid, iso-ascorbic acid, erythrobic acid, potassium nitrate, sodium ascorbate, sodium erythorbate, sodium iso-ascorbate, sodium nitrate, sodium nitrite, nitrogen, benzoic acid, calcium sorbate, ethyl lauroyl arginate, methyl-p-hydroxy benzoate, methyl paraben, potassium acetate, potassium benzoiate, potassium bisulphite, potassium diacetate, potassium lactate, potassium metabisulphite, potassium sorbate, propyl-p-hydroxy benzoate, propyl paraben, sodium acetate, sodium benzoate, sodium bisulphite, sodium nitrite, sodium diacetate, sodium lactate, sodium metabisulphite, sodium salt of methyl-p-hydroxy benzoic acid, sodium salt of propyl-p-hydroxy benzoic acid, sodium sulphate, sodium sulfite, sodium dithionite, sulphurous acid, calcium propionate, dimethyl dicarbonate, natamycin, potassium sorbate, potassium bisulfite, potassium metabisulfite, propionic acid, sodium diacetate, sodium propionate, sodium sorbate, sorbic acid, ascorbic acid, ascorbyl palmitate, ascorbyl stearate, butylated hydro-xyanisole, butylated hydroxytoluene (BHT), butylated hydroxyl anisole (BHA), citric acid, citric acid esters of mono- and/or diglycerides, L-cysteine, L-cysteine hydrochloride, gum guaiacum, gum guaiac, lecithin, lecithin citrate, monoglyceride citrate, monoisopropyl citrate, propyl gallate, sodium metabisulphite, tartaric acid, tertiary butyl hydroquinone, stannous chloride, thiodipropionic acid, dilauryl thiodipropionate, distearyl thiodipropionate, ethoxyquin, sulfur dioxide, formic acid, or tocopherol(s).

[0205] In some embodiments, microbial compositions of the present disclosure include bacterial and/or fungal cells in spore form, vegetative cell form, and/or lysed cell form. In one embodiment, the lysed cell form acts as a mycotoxin binder, e.g. mycotoxins binding to dead cells.

[0206] In some embodiments, the microbial compositions are shelf stable in a refrigerator (35-40° F.) for a period of at least 1, 2, 3, 4, 5, 6, 7, 8, 9, 10, 11, 12, 13, 14, 15, 16, 17, 18, 19, 20, 21, 22, 23, 24, 25, 26, 27, 28, 29, 30, 31, 32, 33, 34, 35, 36, 37, 38, 39, 40, 41, 42, 43, 44, 45, 46, 47, 48, 49, 50, 51, 52, 53, 54, 55, 56, 57, 58, 59, or 60 days. In some embodiments, the microbial compositions are shelf stable in a refrigerator (35-40° F.) for a period of at least 1, 2, 3, 4, 5, 6, 7, 8, 9, 10, 11, 12, 13, 14, 15, 16, 17, 18, 19, 20, 21, 22, 23, 24, 25, 26, 27, 28, 29, 30, 31, 32, 33, 34, 35, 36, 37, 38, 39, 40, 41, 42, 43, 44, 45, 46, 47, 48, 49, 50, 51, 52, 53, 54, 55, 56, 57, 58, 59, or 60 weeks.

[0207] In some embodiments, the microbial compositions are shelf stable at room temperature (68-72° F.) or between 50-77° F. for a period of at least 1, 2, 3, 4, 5, 6, 7, 8, 9, 10, 11, 12, 13, 14, 15, 16, 17, 18, 19, 20, 21, 22, 23, 24, 25, 26, 27, 28, 29, 30, 31, 32, 33, 34, 35, 36, 37, 38, 39, 40, 41, 42, 43, 44, 45, 46, 47, 48, 49, 50, 51, 52, 53, 54, 55, 56, 57, 58, 59, or 60 days. In some embodiments, the microbial compositions are shelf stable at room temperature (68-72° F.) or between 50-77° F. for a period of at least 1, 2, 3, 4, 5, 6, 7, 8, 9, 10, 11, 12, 13, 14, 15, 16, 17, 18, 19, 20, 21, 22, 23, 24, 25, 26, 27, 28, 29, 30, 31, 32, 33, 34, 35, 36, 37, 38, 39, 40, 41, 42, 43, 44, 45, 46, 47, 48, 49, 50, 51, 52, 53, 54, 55, 56, 57, 58, 59, or 60 weeks.

[0208] In some embodiments, the microbial compositions are shelf stable at −23-35° F. for a period of at least 1, 2, 3, 4, 5, 6, 7, 8, 9, 10, 11, 12, 13, 14, 15, 16, 17, 18, 19, 20, 21, 22, 23, 24, 25, 26, 27, 28, 29, 30, 31, 32, 33, 34, 35, 36, 37, 38, 39, 40, 41, 42, 43, 44, 45, 46, 47, 48, 49, 50, 51, 52, 53, 54, 55, 56, 57, 58, 59, or 60 days. In some embodiments, the microbial compositions are shelf stable at −23-35° F. for a period of at least 1, 2, 3, 4, 5, 6, 7, 8, 9, 10, 11, 12, 13, 14, 15, 16, 17, 18, 19, 20, 21, 22, 23, 24, 25, 26, 27, 28, 29, 30, 31, 32, 33, 34, 35, 36, 37, 38, 39, 40, 41, 42, 43, 44, 45, 46, 47, 48, 49, 50, 51, 52, 53, 54, 55, 56, 57, 58, 59, or 60 weeks.

[0209] In some embodiments, the microbial compositions are shelf stable at 77-100° F. for a period of at least 1, 2, 3, 4, 5, 6, 7, 8, 9, 10, 11, 12, 13, 14, 15, 16, 17, 18, 19, 20, 21, 22, 23, 24, 25, 26, 27, 28, 29, 30, 31, 32, 33, 34, 35, 36, 37, 38, 39, 40, 41, 42, 43, 44, 45, 46, 47, 48, 49, 50, 51, 52, 53, 54, 55, 56, 57, 58, 59, or 60 days. In some embodiments, the microbial compositions are shelf stable at 77-100° F. for a period of at least 1, 2, 3, 4, 5, 6, 7, 8, 9, 10, 11, 12, 13, 14, 15, 16, 17, 18, 19, 20, 21, 22, 23, 24, 25, 26, 27, 28, 29, 30, 31, 32, 33, 34, 35, 36, 37, 38, 39, 40, 41, 42, 43, 44, 45, 46, 47, 48, 49, 50, 51, 52, 53, 54, 55, 56, 57, 58, 59, or 60 weeks.

[0210] In some embodiments, the microbial compositions are shelf stable at 101-213° F. for a period of at least 1, 2, 3, 4, 5, 6, 7, 8, 9, 10, 11, 12, 13, 14, 15, 16, 17, 18, 19, 20, 21, 22, 23, 24, 25, 26, 27, 28, 29, 30, 31, 32, 33, 34, 35, 36, 37, 38, 39, 40, 41, 42, 43, 44, 45, 46, 47, 48, 49, 50, 51, 52, 53, 54, 55, 56, 57, 58, 59, or 60 days. In some embodiments, the microbial compositions are shelf stable at 101-213° F. for a period of at least 1, 2, 3, 4, 5, 6, 7, 8, 9, 10, 11, 12, 13, 14, 15, 16, 17, 18, 19, 20, 21, 22, 23, 24, 25, 26, 27, 28, 29, 30, 31, 32, 33, 34, 35, 36, 37, 38, 39, 40, 41, 42, 43, 44, 45, 46, 47, 48, 49, 50, 51, 52, 53, 54, 55, 56, 57, 58, 59, or 60 weeks.

[0211] In some embodiments, the microbial compositions of the present disclosure are shelf stable at refrigeration temperatures (35-40° F.), at room temperature (68-72° F.), between 50-77° F., between −23-35° F., between 70-100° F., or between 101-213° F. for a period of about 1 to 100, about 1 to 95, about 1 to 90, about 1 to 85, about 1 to 80, about 1 to 75, about 1 to 70, about 1 to 65, about 1 to 60, about 1 to 55, about 1 to 50, about 1 to 45, about 1 to 40, about 1 to 35, about 1 to 30, about 1 to 25, about 1 to 20, about 1 to 15, about 1 to 10, about 1 to 5, about 5 to 100, about 5 to 95, about 5 to 90, about 5 to 85, about 5 to 80, about 5 to 75, about 5 to 70, about 5 to 65, about 5 to 60, about 5 to 55, about 5 to 50, about 5 to 45, about 5 to 40, about 5 to 35, about 5 to 30, about 5 to 25, about 5 to 20, about 5 to 15, about 5 to 10, about 10 to 100, about 10 to 95, about 10 to 90, about 10 to 85, about 10 to 80, about 10 to 75, about 10 to 70, about 10 to 65, about 10 to 60, about 10 to 55, about 10 to 50, about 10 to 45, about 10 to 40, about 10 to 35, about 10 to 30, about 10 to 25, about 10 to 20, about 10 to 15, about 15 to 100, about 15 to 95, about 15 to 90, about 15 to 85, about 15 to 80, about 15 to 75, about 15 to 70, about 15 to 65, about 15 to 60, about 15 to 55, about 15 to 50, about 15 to 45, about 15 to 40, about 15 to 35, about 15 to 30, about 15 to 25, about 15 to 20, about 20 to 100, about 20 to 95, about 20 to 90, about 20 to 85, about 20 to 80, about 20 to 75, about 20 to 70, about 20 to 65, about 20 to 60, about 20 to 55, about 20 to 50, about 20 to 45, about 20 to 40, about 20 to 35, about 20 to 30, about 20 to 25, about 25 to 100, about 25 to 95, about 25 to 90, about 25 to 85, about 25 to 80, about 25 to 75, about 25 to 70, about 25 to 65, about 25 to 60, about 25 to 55, about 25 to 50, about 25 to 45, about 25 to 40, about 25 to 35, about 25 to 30, about 30 to 100, about 30 to 95, about 30 to 90, about 30 to 85, about 30 to 80, about 30 to 75, about 30 to 70, about 30 to 65, about 30 to 60, about 30 to 55, about 30 to 50, about 30 to 45, about 30 to 40, about 30 to 35, about 35 to 100, about 35 to 95, about 35 to 90, about 35 to 85, about 35 to 80, about 35 to 75, about 35 to 70, about 35 to 65, about 35 to 60, about 35 to 55, about 35 to 50, about 35 to 45, about 35 to 40, about 40 to 100, about 40 to 95, about 40 to 90, about 40 to 85, about 40 to 80, about 40 to 75, about 40 to 70, about 40 to 65, about 40 to 60, about 40 to 55, about 40 to 50, about 40 to 45, about 45 to 100, about 45 to 95, about 45 to 90, about 45 to 85, about 45 to 80, about 45 to 75, about 45 to 70, about 45 to 65, about 45 to 60, about 45 to 55, about 45 to 50, about 50 to 100, about 50 to 95, about 50 to 90, about 50 to 85, about 50 to 80, about 50 to 75, about 50 to 70, about 50 to 65, about 50 to 60, about 50 to 55, about 55 to 100, about 55 to 95, about 55 to 90, about 55 to 85, about 55 to 80, about 55 to 75, about 55 to 70, about 55 to 65, about 55 to 60, about 60 to 100, about 60 to 95, about 60 to 90, about 60 to 85, about 60 to 80, about 60 to 75, about 60 to 70, about 60 to 65, about 65 to 100, about 65 to 95, about 65 to 90, about 65 to 85, about 65 to 80, about 65 to 75, about 65 to 70, about 70 to 100, about 70 to 95, about 70 to 90, about 70 to 85, about 70 to 80, about 70 to 75, about 75 to 100, about 75 to 95, about 75 to 90, about 75 to 85, about 75 to 80, about 80 to 100, about 80 to 95, about 80 to 90, about 80 to 85, about 85 to 100, about 85 to 95, about 85 to 90, about 90 to 100, about 90 to 95, or 95 to 100 weeks

[0212] In some embodiments, the microbial compositions of the present disclosure are shelf stable at refrigeration temperatures (35-40° F.), at room temperature (68-72° F.), between 50-77° F., between −23-35° F., between 70-100° F., or between 101-213° F. for a period of 1 to 100, 1 to 95, 1 to 90, 1 to 85, 1 to 80, 1 to 75, 1 to 70, 1 to 65, 1 to 60, 1 to 55, 1 to 50, 1 to 45, 1 to 40, 1 to 35, 1 to 30, 1 to 25, 1 to 20, 1 to 15, 1 to 10, 1 to 5, 5 to 100, 5 to 95, 5 to 90, 5 to 85, 5 to 80, 5 to 75, 5 to 70, 5 to 65, 5 to 60, 5 to 55, 5 to 50, 5 to 45, 5 to 40, 5 to 35, 5 to 30, 5 to 25, 5 to 20, 5 to 15, 5 to 10, 10 to 100, 10 to 95, 10 to 90, 10 to 85, 10 to 80, 10 to 75, 10 to 70, 10 to 65, 10 to 60, 10 to 55, 10 to 50, 10 to 45, 10 to 40, 10 to 35, 10 to 30, 10 to 25, 10 to 20, 10 to 15, 15 to 100, 15 to 95, 15 to 90, 15 to 85, 15 to 80, 15 to 75, 15 to 70, 15 to 65, 15 to 60, 15 to 55, 15 to 50, 15 to 45, 15 to 40, 15 to 35, 15 to 30, 15 to 25, 15 to 20, 20 to 100, 20 to 95, 20 to 90, 20 to 85, 20 to 80, 20 to 75, 20 to 70, 20 to 65, 20 to 60, 20 to 55, 20 to 50, 20 to 45, 20 to 40, 20 to 35, 20 to 30, 20 to 25, 25 to 100, 25 to 95, 25 to 90, 25 to 85, 25 to 80, 25 to 75, 25 to 70, 25 to 65, 25 to 60, 25 to 55, 25 to 50, 25 to 45, 25 to 40, 25 to 35, 25 to 30, 30 to 100, 30 to 95, 30 to 90, 30 to 85, 30 to 80, 30 to 75, 30 to 70, 30 to 65, 30 to 60, 30 to 55, 30 to 50, 30 to 45, 30 to 40, 30 to 35, 35 to 100, 35 to 95, 35 to 90, 35 to 85, 35 to 80, 35 to 75, 35 to 70, 35 to 65, 35 to 60, 35 to 55, 35 to 50, 35 to 45, 35 to 40, 40 to 100, 40 to 95, 40 to 90, 40 to 85, 40 to 80, 40 to 75, 40 to 70, 40 to 65, 40 to 60, 40 to 55, 40 to 50, 40 to 45, 45 to 100, 45 to 95, 45 to 90, 45 to 85, 45 to 80, 45 to 75, 45 to 70, 45 to 65, 45 to 60, 45 to 55, 45 to 50, 50 to 100, 50 to 95, 50 to 90, 50 to 85, 50 to 80, 50 to 75, 50 to 70, 50 to 65, 50 to 60, 50 to 55, 55 to 100, 55 to 95, 55 to 90, 55 to 85, 55 to 80, 55 to 75, 55 to 70, 55 to 65, 55 to 60, 60 to 100, 60 to 95, 60 to 90, 60 to 85, 60 to 80, 60 to 75, 60 to 70, 60 to 65, 65 to 100, 65 to 95, 65 to 90, 65 to 85, 65 to 80, 65 to 75, 65 to 70, 70 to 100, 70 to 95, 70 to 90, 70 to 85, 70 to 80, 70 to 75, 75 to 100, 75 to 95, 75 to 90, 75 to 85, 75 to 80, 80 to 100, 80 to 95, 80 to 90, 80 to 85, 85 to 100, 85 to 95, 85 to 90, 90 to 100, 90 to 95, or 95 to 100 weeks.

[0213] In some embodiments, the microbial compositions of the present disclosure are shelf stable at refrigeration temperatures (35-40° F.), at room temperature (68-72° F.), between 50-77° F., between −23-35° F., between 70-100° F., or between 101-213° F. for a period of about 1 to 36, about 1 to 34, about 1 to 32, about 1 to 30, about 1 to 28, about 1 to 26, about 1 to 24, about 1 to 22, about 1 to 20, about 1 to 18, about 1 to 16, about 1 to 14, about 1 to 12, about 1 to 10, about 1 to 8, about 1 to 6, about 1 one 4, about 1 to 2, about 4 to 36, about 4 to 34, about 4 to 32, about 4 to 30, about 4 to 28, about 4 to 26, about 4 to 24, about 4 to 22, about 4 to 20, about 4 to 18, about 4 to 16, about 4 to 14, about 4 to 12, about 4 to 10, about 4 to 8, about 4 to 6, about 6 to 36, about 6 to 34, about 6 to 32, about 6 to 30, about 6 to 28, about 6 to 26, about 6 to 24, about 6 to 22, about 6 to 20, about 6 to 18, about 6 to 16, about 6 to 14, about 6 to 12, about 6 to 10, about 6 to 8, about 8 to 36, about 8 to 34, about 8 to 32, about 8 to 30, about 8 to 28, about 8 to 26, about 8 to 24, about 8 to 22, about 8 to 20, about 8 to 18, about 8 to 16, about 8 to 14, about 8 to 12, about 8 to 10, about 10 to 36, about 10 to 34, about 10 to 32, about 10 to 30, about 10 to 28, about 10 to 26, about 10 to 24, about 10 to 22, about 10 to 20, about 10 to 18, about 10 to 16, about 10 to 14, about 10 to 12, about 12 to 36, about 12 to 34, about 12 to 32, about 12 to 30, about 12 to 28, about 12 to 26, about 12 to 24, about 12 to 22, about 12 to 20, about 12 to 18, about 12 to 16, about 12 to 14, about 14 to 36, about 14 to 34, about 14 to 32, about 14 to 30, about 14 to 28, about 14 to 26, about 14 to 24, about 14 to 22, about 14 to 20, about 14 to 18, about 14 to 16, about 16 to 36, about 16 to 34, about 16 to 32, about 16 to 30, about 16 to 28, about 16 to 26, about 16 to 24, about 16 to 22, about 16 to 20, about 16 to 18, about 18 to 36, about 18 to 34, about 18 to 32, about 18 to 30, about 18 to 28, about 18 to 26, about 18 to 24, about 18 to 22, about 18 to 20, about 20 to 36, about 20 to 34, about 20 to 32, about 20 to 30, about 20 to 28, about 20 to 26, about 20 to 24, about 20 to 22, about 22 to 36, about 22 to 34, about 22 to 32, about 22 to 30, about 22 to 28, about 22 to 26, about 22 to 24, about 24 to 36, about 24 to 34, about 24 to 32, about 24 to 30, about 24 to 28, about 24 to 26, about 26 to 36, about 26 to 34, about 26 to 32, about 26 to 30, about 26 to 28, about 28 to 36, about 28 to 34, about 28 to 32, about 28 to 30, about 30 to 36, about 30 to 34, about 30 to 32, about 32 to 36, about 32 to 34, or about 34 to 36 months.

[0214] In some embodiments, the microbial compositions of the present disclosure are shelf stable at refrigeration temperatures (35-40° F.), at room temperature (68-72° F.), between 50-77° F., between −23-35° F., between 70-100° F., or between 101-213° F. for a period of 1 to 36 1 to 34 1 to 32 1 to 30 1 to 28 1 to 26 1 to 24 1 to 22 1 to 20 1 to 18 1 to 16 1 to 14 1 to 12 1 to 10 1 to 81 to 61 one 4 1 to 2 4 to 36 4 to 34 4 to 32 4 to 30 4 to 28 4 to 26 4 to 24 4 to 22 4 to 20 4 to 18 4 to 16 4 to 14 4 to 12 4 to 10 4 to 8 4 to 6 6 to 36 6 to 34 6 to 32 6 to 30 6 to 28 6 to 26 6 to 24 6 to 22 6 to 20 6 to 18 6 to 16 6 to 14 6 to 12 6 to 10 6 to 8 8 to 36 8 to 34 8 to 32 8 to 30 8 to 28 8 to 26 8 to 24 8 to 22 8 to 20 8 to 18 8 to 16 8 to 14 8 to 12 8 to 10 10 to 36 10 to 34 10 to 32 10 to 30 10 to 28 10 to 26 10 to 24 10 to 22 10 to 20 10 to 18 10 to 16 10 to 14 10 to 12 12 to 36 12 to 34 12 to 32 12 to 30 12 to 28 12 to 26 12 to 24 12 to 22 12 to 20 12 to 18 12 to 16 12 to 14 14 to 36 14 to 34 14 to 32 14 to 30 14 to 28 14 to 26 14 to 24 14 to 22 14 to 20 14 to 18 14 to 16 16 to 36 16 to 34 16 to 32 16 to 30 16 to 28 16 to 26 16 to 24 16 to 22 16 to 20 16 to 18 18 to 36 18 to 34 18 to 32 18 to 30 18 to 28 18 to 26 18 to 24 18 to 22 18 to 20 20 to 36 20 to 34 20 to 32 20 to 30 20 to 28 20 to 26 20 to 24 20 to 22 22 to 36 22 to 34 22 to 32 22 to 30 22 to 28 22 to 26 22 to 24 24 to 36 24 to 34 24 to 32 24 to 30 24 to 28 24 to 26 26 to 36 26 to 34 26 to 32 26 to 30 26 to 28 28 to 36 28 to 34 28 to 32 28 to 30 30 to 36 30 to 34 30 to 32 32 to 36 32 to 34, or about 34 to 36.

[0215] In some embodiments, the microbial compositions of the present disclosure are shelf stable at any of the disclosed temperatures and/or temperature ranges and spans of time at a relative humidity of at least 1, 2, 3, 4, 5, 6, 7, 8, 9, 10, 11, 12, 13, 14, 15, 16, 17, 18, 19, 20, 21, 22, 23, 24, 25, 26, 27, 28, 29, 30, 31, 32, 33, 34, 35, 36, 37, 38, 39, 40, 41, 42, 43, 44, 45, 46, 47, 48, 49, 50, 51, 52, 53, 54, 55, 56, 57, 58, 59, 60, 61, 62, 63, 64, 65, 66, 67, 68, 69, 70, 71, 72, 73, 74, 75, 76, 77, 78, 79, 80, 81, 82, 83, 84, 85, 86, 87, 88, 89, 90, 91, 92, 93, 94, 95, 96, 97, or 98%.

### Encapsulated Compositions

[0216] In some embodiments, the microbes or microbial compositions of the disclosure are encapsulated in an encapsulating composition. An encapsulating composition protects the microbes from external stressors prior to entering the gastrointestinal tract of ungulates. Encapsulating compositions further create an environment that may be beneficial to the microbes, such as minimizing the oxidative stresses of an aerobic environment on anaerobic microbes. See Kalsta et al. (U.S. Pat. No. 5,104,662A), Ford (U.S. Pat. No. 5,733,568A), and Mosbach and Nilsson (U.S. Pat. No. 4,647,536A) for encapsulation compositions of microbes, and methods of encapsulating microbes.

[0217] In one embodiment, the encapsulating composition comprises microcapsules having a multiplicity of liquid cores encapsulated in a solid shell material. For purposes of the disclosure, a “multiplicity” of cores is defined as two or more.

[0218] A first category of useful fusible shell materials is that of normally solid fats, including fats which are already of suitable hardness and animal or vegetable fats and oils which are hydrogenated until their melting points are sufficiently high to serve the purposes of the present disclosure. Depending on the desired process and storage temperatures and the specific material selected, a particular fat can be either a normally solid or normally liquid material. The terms “normally solid” and “normally liquid” as used herein refer to the state of a material at desired temperatures for storing the resulting microcapsules. Since fats and hydrogenated oils do not, strictly speaking, have melting points, the term “melting point” is used herein to describe the minimum temperature at which the fusible material becomes sufficiently softened or liquid to be successfully emulsified and spray cooled, thus roughly corresponding to the maximum temperature at which the shell material has sufficient integrity to prevent release of the choline cores. “Melting point” is similarly defined herein for other materials which do not have a sharp melting point.

[0219] Specific examples of fats and oils useful herein (some of which require hardening) are as follows: animal oils and fats, such as beef tallow, mutton tallow, lamb tallow, lard or pork fat, fish oil, and sperm oil; vegetable oils, such as canola oil, cottonseed oil, peanut oil, corn oil, olive oil, soybean oil, sunflower oil, safflower oil, coconut oil, palm oil, linseed oil, tung oil, and castor oil; fatty acid monoglycerides and diglycerides; free fatty acids, such as stearic acid, palmitic acid, and oleic acid; and mixtures thereof. The above listing of oils and fats is not meant to be exhaustive, but only exemplary.

[0220] Specific examples of fatty acids include linoleic acid, γ-linoleic acid, dihomo-γ-linolenic acid, arachidonic acid, docosatetraenoic acid, vaccenic acid, nervonic acid, mead acid, erucic acid, gondoic acid, elaidic acid, oleic acid, palitoleic acid, stearidonic acid, eicosapentaenoic acid, valeric acid, caproic acid, enanthic acid, caprylic acid, pelargonic acid, capric acid, undecylic acid, lauric acid, tridecylic acid, myristic acid, pentadecylic acid, palmitic acid, margaric acid, stearic acid, nonadecyclic acid, arachidic acid, heneicosylic acid, behenic acid, tricosylic acid, lignoceric acid, pentacosylic acid, cerotic acid, heptacosylic acid, montanic acid, nonacosylic acid, melissic acid, henatriacontylic acid, lacceroic acid, psyllic acid, geddic acid, ceroplastic acid, hexatriacontylic acid, heptatriacontanoic acid, and octatriacontanoic acid.

[0221] Another category of fusible materials useful as encapsulating shell materials is that of waxes. Representative waxes contemplated for use herein are as follows: animal waxes, such as beeswax, lanolin, shell wax, and Chinese insect wax; vegetable waxes, such as camauba, candelilla, bayberry, and sugar cane; mineral waxes, such as paraffin, microcrystalline petroleum, ozocerite, ceresin, and montan; synthetic waxes, such as low molecular weight polyolefin (e.g., CARBOWAX), and polyol ether-esters (e.g., sorbitol); Fischer-Tropsch process synthetic waxes; and mixtures thereof. Water-soluble waxes, such as CARBOWAX and sorbitol, are not contemplated herein if the core is aqueous.

[0222] Still other fusible compounds useful herein are fusible natural resins, such as rosin, balsam, shellac, and mixtures thereof.

[0223] Various adjunct materials are contemplated for incorporation in fusible materials according to the present disclosure. For example, antioxidants, light stabilizers, dyes and lakes, flavors, essential oils, anti-caking agents, fillers, pH stabilizers, sugars (monosaccharides, disaccharides, trisaccharides, and polysaccharides) and the like can be incorporated in the fusible material in amounts which do not diminish its utility for the present disclosure.

[0224] The core material contemplated herein constitutes from about 0.1% to about 50%, about 1% to about 35%, or about 5% to about 30% by weight of the microcapsules. In some embodiments, the core material contemplated herein constitutes no more than about 30% by weight of the microcapsules. In some embodiments, the core material contemplated herein constitutes about 5% by weight of the microcapsules. The core material is contemplated as either a liquid or solid at contemplated storage temperatures of the microcapsules.

[0225] The cores may include other additives well-known in the pharmaceutical art, including edible sugars, such as sucrose, glucose, maltose, fructose, lactose, cellobiose, monosaccharides, disaccharides, trisaccharides, polysaccharides, and mixtures thereof; artificial sweeteners, such as aspartame, saccharin, cyclamate salts, and mixtures thereof; edible acids, such as acetic acid (vinegar), citric acid, ascorbic acid, tartaric acid, and mixtures thereof; edible starches, such as corn starch; hydrolyzed vegetable protein; water-soluble vitamins, such as Vitamin C; water-soluble medicaments; water-soluble nutritional materials, such as ferrous sulfate; flavors; salts; monosodium glutamate; antimicrobial agents, such as sorbic acid; antimycotic agents, such as potassium sorbate, sorbic acid, sodium benzoate, and benzoic acid; food grade pigments and dyes; and mixtures thereof. Other potentially useful supplemental core materials will be apparent to those of ordinary skill in the art.

[0226] Emulsifying agents may be employed to assist in the formation of stable emulsions. Representative emulsifying agents include glyceryl monostearate, polysorbate esters, ethoxylated mono- and diglycerides, and mixtures thereof.

[0227] For ease of processing, and particularly to enable the successful formation of a reasonably stable emulsion, the viscosities of the core material and the shell material should be similar at the temperature at which the emulsion is formed. In particular, the ratio of the viscosity of the shell to the viscosity of the core, expressed in centipoise or comparable units, and both measured at the temperature of the emulsion, should be from about 22:1 to about 1:1, desirably from about 8:1 to about 1:1, and preferably from about 3:1 to about 1:1. A ratio of 1:1 would be ideal, but a viscosity ratio within the recited ranges is useful.

[0228] Encapsulating compositions are not limited to microcapsule compositions as disclosed above. In some embodiments encapsulating compositions encapsulate the microbial compositions in an adhesive polymer that can be natural or synthetic without toxic effect. In some embodiments, the encapsulating composition may be a matrix selected from sugar matrix, gelatin matrix, polymer matrix, silica matrix, starch matrix, foam matrix, etc. In some embodiments, the encapsulating composition may be selected from polyvinyl acetates; polyvinyl acetate copolymers; ethylene vinyl acetate (EVA) copolymers; polyvinyl alcohols; polyvinyl alcohol copolymers; celluloses, including ethylcelluloses, methylcelluloses, hydroxymethylcelluloses, hydroxypropylcelluloses and carboxymethylcellulose; polyvinylpyrolidones; polysaccharides, including starch, modified starch, dextrins, maltodextrins, alginate and chitosans; monosaccharides; fats; fatty acids, including oils; proteins, including gelatin and zeins; gum arabics; shellacs; vinylidene chloride and vinylidene chloride copolymers; calcium lignosulfonates; acrylic copolymers; polyvinylacrylates; polyethylene oxide; acrylamide polymers and copolymers; polyhydroxyethyl acrylate, methylacrylamide monomers; and polychloroprene.

[0229] In some embodiments, the encapsulating shell of the present disclosure can be up to 10 μm, 20 μm, 30 μm, 40 μm, 50 μm, 60 μm, 70 μm, 80 μm, 90 μm, 100 μm, 110 μm, 120 μm, 130 μm, 140 μm, 150 μm, 160 μm, 170 μm, 180 μm, 190 μm, 200 μm, 210 μm, 220 μm, 230 μm, 240 μm, 250 μm, 260 μm, 270 μm, 280 μm, 290 μm, 300 μm, 310 μm, 320 μm, 330 μm, 340 μm, 350 μm, 360 μm, 370 μm, 380 μm, 390 μm, 400 μm, 410 μm, 420 μm, 430 μm, 440 μm, 450 μm, 460 μm, 470 μm, 480 μm, 490 μm, 500 μm, 510 μm, 520 μm, 530 μm, 540 μm, 550 μm, 560 μm, 570 μm, 580 μm, 590 μm, 600 μm, 610 μm, 620 μm, 630 μm, 640 μm, 650 μm, 660 μm, 670 μm, 680 μm, 690 μm, 700 μm, 710 μm, 720 μm, 730 μm, 740 μm, 750 μm, 760 μm, 770 μm, 780 μm, 790 μm, 800 μm, 810 μm, 820 μm, 830 μm, 840 μm, 850 μm, 860 μm, 870 μm, 880 μm, 890 μm, 900 μm, 910 μm, 920 μm, 930 μm, 940 μm, 950 μm, 960 μm, 970 μm, 980 μm, 990 μm, 1000 μm, 1010 μm, 1020 μm, 1030 μm, 1040 μm, 1050 μm, 1060 μm, 1070 μm, 1080 μm, 1090 μm, 1100 μm, 1110 μm, 1120 μm, 1130 μm, 1140 μm, 1150 μm, 1160 μm, 1170 μm, 1180 μm, 1190 μm, 1200 μm, 1210 μm, 1220 μm, 1230 μm, 1240 μm, 1250 μm, 1260 μm, 1270 μm, 1280 μm, 1290 μm, 1300 μm, 1310 μm, 1320 μm, 1330 μm, 1340 μm, 1350 μm, 1360 μm, 1370 μm, 1380 μm, 1390 μm, 1400 μm, 1410 μm, 1420 μm, 1430 μm, 1440 μm, 1450 μm, 1460 μm, 1470 μm, 1480 μm, 1490 μm, 1500 μm, 1510 μm, 1520 μm, 1530 μm, 1540 μm, 1550 μm, 1560 μm, 1570 μm, 1580 μm, 1590 μm, 1600 μm, 1610 μm, 1620 μm, 1630 μm, 1640 μm, 1650 μm, 1660 μm, 1670 μm, 1680 μm, 1690 μm, 1700 μm, 1710 μm, 1720 μm, 1730 μm, 1740 μm, 1750 μm, 1760 μm, 1770 μm, 1780 μm, 1790 μm, 1800 μm, 1810 μm, 1820 μm, 1830 μm, 1840 μm, 1850 μm, 1860 μm, 1870 μm, 1880 μm, 1890 μm, 1900 μm, 1910 μm, 1920 μm, 1930 μm, 1940 μm, 1950 μm, 1960 μm, 1970 μm, 1980 μm, 1990 μm, 2000 μm, 2010 μm, 2020 μm, 2030 μm, 2040 μm, 2050 μm, 2060 μm, 2070 μm, 2080 μm, 2090 μm, 2100 μm, 2110 μm, 2120 μm, 2130 μm, 2140 μm, 2150 μm, 2160 μm, 2170 μm, 2180 μm, 2190 μm, 2200 μm, 2210 μm, 2220 μm, 2230 μm, 2240 μm, 2250 μm, 2260 μm, 2270 μm, 2280 μm, 2290 μm, 2300 μm, 2310 μm, 2320 μm, 2330 μm, 2340 μm, 2350 μm, 2360 μm, 2370 μm, 2380 μm, 2390 μm, 2400 μm, 2410 μm, 2420 μm, 2430 μm, 2440 μm, 2450 μm, 2460 μm, 2470 μm, 2480 μm, 2490 μm, 2500 μm, 2510 μm, 2520 μm, 2530 μm, 2540 μm, 2550 μm, 2560 μm, 2570 μm, 2580 μm, 2590 μm, 2600 μm, 2610 μm, 2620 μm, 2630 μm, 2640 μm, 2650 μm, 2660 μm, 2670 μm, 2680 μm, 2690 μm, 2700 μm, 2710 μm, 2720 μm, 2730 μm, 2740 μm, 2750 μm, 2760 μm, 2770 μm, 2780 μm, 2790 μm, 2800 μm, 2810 μm, 2820 μm, 2830 μm, 2840 μm, 2850 μm, 2860 μm, 2870 μm, 2880 μm, 2890 μm, 2900 μm, 2910 μm, 2920 μm, 2930 μm, 2940 μm, 2950 μm, 2960 μm, 2970 μm, 2980 μm, 2990 μm, or 3000 μm thick.

### Animal Feed

[0230] In some embodiments, compositions of the present disclosure are mixed with animal feed. In some embodiments, animal feed may be present in various forms such as pellets, capsules, granulated, powdered, liquid, or semi-liquid.

[0231] In some embodiments, compositions of the present disclosure are mixed into the premix at at the feed mill (e.g., Carghill or Western Millin), alone as a standalone premix, and/or alongside other feed additives such as MONENSIN, vitamins, etc. In one embodiment, the compositions of the present disclosure are mixed into the feed at the feed mill. In another embodiment, compositions of the present disclosure are mixed into the feed itself.

[0232] In some embodiments, feed of the present disclosure may be supplemented with water, premix or premixes, forage, fodder, beans (e.g., whole, cracked, or ground), grains (e.g., whole, cracked, or ground), bean- or grain-based oils, bean- or grain-based meals, bean- or grain-based haylage or silage, bean- or grain-based syrups, fatty acids, sugar alcohols (e.g., polyhydric alcohols), commercially available formula feeds, and mixtures thereof.

[0233] In some embodiments, forage encompasses hay, haylage, and silage. In some embodiments, hays include grass hays (e.g., sudangrass, orchardgrass, or the like), alfalfa hay, and clover hay. In some embodiments, haylages include grass haylages, sorghum haylage, and alfalfa haylage. In some embodiments, silages include maize, oat, wheat, alfalfa, clover, and the like.

[0234] In some embodiments, premix or premixes may be utilized in the feed. Premixes may comprise micro-ingredients such as vitamins, minerals, amino acids; chemical preservatives; pharmaceutical compositions such as antibiotics and other medicaments; fermentation products, and other ingredients. In some embodiments, premixes are blended into the feed.

[0235] In some embodiments, the feed may include feed concentrates such as soybean hulls, sugar beet pulp, molasses, high protein soybean meal, ground corn, shelled corn, wheat midds, distiller grain, cottonseed hulls, rumen-bypass protein, rumen-bypass fat, and grease. See Luhman (U.S. Publication US20150216817A1), Anderson et al. (U.S. Pat. No. 3,484,243) and Porter and Luhman (U.S. Pat. No. 9,179,694B2) for animal feed and animal feed supplements capable of use in the present compositions and methods.

[0236] In some embodiments, feed occurs as a compound, which includes, in a mixed composition capable of meeting the basic dietary needs, the feed itself, vitamins, minerals, amino acids, and other necessary components. Compound feed may further comprise premixes.

[0237] In some embodiments, microbial compositions of the present disclosure may be mixed with animal feed, premix, and/or compound feed. Individual components of the animal feed may be mixed with the microbial compositions prior to feeding to ruminants. The microbial compositions of the present disclosure may be applied into or on a premix, into or on a feed, and/or into or on a compound feed.

### Administration of Microbial Compositions

[0238] In some embodiments, the microbial compositions of the present disclosure are administered to ruminants. In some embodiments, the microbial compositions of the present disclosure are administered to cattle such as steers, bulls, cows, heifers, or calves. In some embodiments, the microbial compositions of the present disclosure are administered to cows. In some embodiments, the microbial compositions of the present disclosure are administered to calves.

[0239] In some embodiments, the microbial compositions of the present disclosure are administered to ruminants via the oral route. In some embodiments the microbial compositions are administered via a direct injection route into the gastrointestinal tract. In further embodiments, the direct injection administration delivers the microbial compositions directly to the rumen. In some embodiments, the microbial compositions of the present disclosure are administered to animals anally. In further embodiments, anal administration is in the form of an inserted suppository.

[0240] In some embodiments, the microbial composition is administered in a dose comprise a total of, or at least, 1 mL, 2 mL, 3 mL, 4 mL, 5 mL, 6 mL, 7 mL, 8 mL, 9 mL, 10 mL, 11 mL, 12 mL, 13 mL, 14 mL, 15 mL, 16 mL, 17 mL, 18 mL, 19 mL, 20 mL, 21 mL, 22 mL, 23 mL, 24 mL, 25 mL, 26 mL, 27 mL, 28 mL, 29 mL, 30 mL, 31 mL, 32 mL, 33 mL, 34 mL, 35 mL, 36 mL, 37 mL, 38 mL, 39 mL, 40 mL, 41 mL, 42 mL, 43 mL, 44 mL, 45 mL, 46 mL, 47 mL, 48 mL, 49 mL, 50 mL, 60 mL, 70 mL, 80 mL, 90 mL, 100 mL, 200 mL, 300 mL, 400 mL, 500 mL, 600 mL, 700 mL, 800 mL, 900 mL, or 1,000 mL.

[0241] In some embodiments, the microbial composition is administered in a dose comprising a total of, or at least, 10¹⁸, 10¹⁷, 10¹⁶, 10¹⁵, 10¹⁴, 10¹³, 10¹², 10¹¹, 10¹⁰, 10⁹, 10⁸, 10⁷, 10⁶, 10⁵, 10⁴, 10³, or 10² microbial cells.

[0242] In some embodiments, the microbial compositions are mixed with feed, and the administration occurs through the ingestion of the microbial compositions along with the feed. In some embodiments, the dose of the microbial composition is administered such that there exists 10² to 10¹², 10³ to 10¹², 10⁴ to 10¹², 10⁵ to 10¹², 10⁶ to 10¹², 10⁷ to 10¹², 10⁸ to 10¹², 10⁹ to 10¹², 10¹⁰ to 10¹², 10¹¹ to 10¹², 10² to 10¹¹, 10³ to 10¹¹, 10⁴ to 10¹¹, 10⁵ to 10¹¹, 10⁶ to 10¹¹, 10⁷ to 10¹¹, 10⁸ to 10¹¹, 10⁹ to 10¹¹, 10¹⁰ to 10¹¹, 10² to 10¹⁰, 10³ to 10¹⁰, 10⁴ to 10¹⁰, 10⁵ to 10¹⁰, 10⁶ to 10¹⁰, 10⁷ to 10¹⁰, 10⁸ to 10¹⁰, 10⁹ to 10¹⁰, 10² to 10⁹, 10³ to 10⁹, 10⁴ to 10⁹, 10⁵ to 10⁹, 10⁶ to 10⁹, 10⁷ to 10⁹, 10⁸ to 10⁹, 10² to 10⁸, 10³ to 10⁸, 10⁴ to 10⁸, 10⁵ to 10⁸, 10⁶ to 10⁸, 10⁷ to 10⁸, 10² to 10⁷, 10³ to 10⁷, 10⁴ to 10⁷, 10⁵ to 10⁷, 10⁶ to 10⁷, 10² to 10⁶, 10³ to 10⁶, 10⁴ to 10⁶, 10⁵ to 10⁶, 10² to 10⁵, 10³ to 10⁵, 10⁴ to 10⁵, 10² to 10⁴, 10³ to 10⁴, 10² to 10³, 10¹², 10¹¹, 10¹⁰, 10⁹, 10⁸, 10⁷, 10⁶, 10⁵, 10⁴, 10³, or 10² total microbial cells per gram or milliliter of the composition.

[0243] In some embodiments, the microbial compositions are mixed with feed, and the administration occurs through the ingestion of the microbial compositions along with the feed. In some embodiments, the dose of the microbial composition is administered such that there exists 10² to 10¹², 10³ to 10¹², 10⁴ to 10¹², 10⁵ to 10¹², 10⁶ to 10¹², 10⁷ to 10¹², 10⁸ to 10¹², 10⁹ to 10¹², 10¹⁰ to 10¹², 10¹¹ to 10¹², 10² to 10¹¹, 10³ to 10¹¹, 10⁴ to 10¹¹, 10⁵ to 10¹¹, 10⁶ to 10¹¹, 10⁷ to 10¹¹, 10⁸ to 10¹¹, 10⁹ to 10¹¹, 10¹⁰ to 10¹¹, 10² to 10¹⁰, 10³ to 10¹⁰, 10⁴ to 10¹⁰, 10⁵ to 10¹⁰, 10⁶ to 10¹⁰, 10⁷ to 10¹⁰, 10⁸ to 10¹⁰, 10⁹ to 10¹⁰, 10² to 10⁷, 10³ to 10⁷, 10⁴ to 10⁷, 10⁵ to 10⁷, 10⁶ to 10⁹, 10⁷ to 10⁹, 10⁸ to 10⁹, 10² to 10⁸, 10³ to 10⁸, 10⁴ to 10⁸, 10⁵ to 10⁸, 10⁶ to 10⁸, 10⁷ to 10⁸, 10² to 10⁷, 10³ to 10⁷, 10⁴ to 10⁷, 10⁵ to 10⁷, 10⁶ to 10⁷, 10² to 10⁶, 10³ to 10⁶, 10⁴ to 10⁶, 10⁵ to 10⁶, 10² to 10⁵, 10³ to 10⁵, 10⁴ to 10⁵, 10² to 10⁴, 10³ to 10⁴, 10² to 10³, 10¹², 10¹¹, 10¹⁰, 10⁹, 10⁸, 10⁷, 10⁶, 10⁵, 10⁴, 10³, or 10² colony forming units per gram or milliliter of the composition.

[0244] In some embodiments, the administered dose of the microbial composition comprises 10² to 10¹⁸, 10³ to 10¹⁸, 10⁴ to 10¹⁸, 10⁵ to 10¹⁸, 10⁶ to 10¹⁸, 10⁷ to 10¹⁸, 10⁸ to 10¹⁸, 10⁹ to 10¹⁸, 10¹⁰ to 10¹⁸, 10¹¹ to 10¹⁸, 10¹² to 10¹⁸, 10¹³ to 10¹⁸, 10¹⁴ to 10¹⁸, 10¹⁵ to 10¹⁸, 10¹⁶ to 10¹⁸, 10¹⁷ to 10¹⁸, 10² to 10¹², 10³ to 10¹², 10⁴ to 10¹², 10⁵ to 10¹², 10⁶ to 10¹², 10⁷ to 10¹², 10⁸ to 10¹², 10⁹ to 10¹², 10¹⁰ to 10¹², 10¹¹ to 10¹², 10² to 10¹¹, 10³ to 10¹¹, 10⁴ to 10¹¹, 10⁵ to 10¹¹, 10⁶ to 10¹¹, 10⁷ to 10¹¹, 10⁸ to 10¹¹, 10⁹ to 10¹¹, 10¹⁰ to 10¹¹, 10² to 10¹⁰, 10³ to 10¹⁰, 10⁴ to 10¹⁰, 10⁵ to 10¹⁰, 10⁶ to 10¹⁰, 10⁷ to 10¹⁰, 10⁸ to 10¹⁰, 10⁹ to 10¹⁰, 10² to 10², 10³ to 101, 10⁴ to 101, 10⁵ to 101, 10⁶ to 10⁹, 10⁷ to 10⁹, 10⁸ to 10⁹, 10² to 10⁸, 10³ to 10⁸, 10⁴ to 10⁸, 10⁵ to 10⁸, 10⁶ to 10⁸, 10⁷ to 10⁸, 10² to 10⁷, 10³ to 10⁷, 10⁴ to 10⁷, 10⁵ to 10⁷, 10⁶ to 10⁷, 10² to 10⁶, 10³ to 10⁶, 10⁴ to 10⁶, 10⁵ to 10⁶, 10² to 10⁵ 10³ to 10⁵ 10⁴ to 10⁵ 10² to 10⁴ 10³ to 10⁴ 10² to 10³ 10¹⁸, 10¹⁷, 10¹⁶, 10¹⁵, 10¹⁴, 10¹³, 10¹², 10¹¹, 10¹⁰, 10⁹, 10⁸, 10⁷, 10⁶, 10⁵, 10⁴, 10³, or 10² total microbial cells.

[0245] In some embodiments, the administered dose of each microbe in the microbial composition is at least about, at least about 10³ colony forming units (CFU), at least about 10⁴ CFU, at least about 10⁵ CFU, at least about 10⁶ CFU, at least about 10⁷ CFU, at least about 10⁸ CFU, at least about 10⁹ CFU, at least about 10¹⁰ CFU, at least about 10¹¹ CFU, at least about 10¹² CFU, at least about 10¹³ CFU, at least about 10¹⁴ CFU, at least about 10¹⁵ CFU, at least about 10¹⁶ CFU, at least about 10¹⁷ CFU, at least about 10¹⁸ CFU, at least about 10¹⁹ CFU, or at least about 10²⁰ CFU.

[0246] In some embodiments, the composition is administered 1 or more times per day. In some aspects, the composition is administered with food each time the animal is fed. In some embodiments, the composition is administered 1 to 10, 1 to 9, 1 to 8, 1 to 7, 1 to 6, 1 to 5, 1 to 4, 1 to 3, 1 to 2, 2 to 10, 2 to 9, 2 to 8, 2 to 7, 2 to 6, 2 to 5, 2 to 4, 2 to 3, 3 to 10, 3 to 9, 3 to 8, 3 to 7, 3 to 6, 3 to 5, 3 to 4, 4 to 10, 4 to 9, 4 to 8, 4 to 7, 4 to 6, 4 to 5, 5 to 10, 5 to 9, 5 to 8, 5 to 7, 5 to 6, 6 to 10, 6 to 9, 6 to 8, 6 to 7, 7 to 10, 7 to 9, 7 to 8, 8 to 10, 8 to 9, 9 to 10, 1, 2, 3, 4, 5, 6, 7, 8, 9, or 10 times per day.

[0247] In some embodiments, the microbial composition is administered 1 to 10, 1 to 9, 1 to 8, 1 to 7, 1 to 6, 1 to 5, 1 to 4, 1 to 3, 1 to 2, 2 to 10, 2 to 9, 2 to 8, 2 to 7, 2 to 6, 2 to 5, 2 to 4, 2 to 3, 3 to 10, 3 to 9, 3 to 8, 3 to 7, 3 to 6, 3 to 5, 3 to 4, 4 to 10, 4 to 9, 4 to 8, 4 to 7, 4 to 6, 4 to 5, 5 to 10, 5 to 9, 5 to 8, 5 to 7, 5 to 6, 6 to 10, 6 to 9, 6 to 8, 6 to 7, 7 to 10, 7 to 9, 7 to 8, 8 to 10, 8 to 9, 9 to 10, 1, 2, 3, 4, 5, 6, 7, 8, 9, or 10 times per week.

[0248] In some embodiments, the microbial composition is administered 1 to 10, 1 to 9, 1 to 8, 1 to 7, 1 to 6, 1 to 5, 1 to 4, 1 to 3, 1 to 2, 2 to 10, 2 to 9, 2 to 8, 2 to 7, 2 to 6, 2 to 5, 2 to 4, 2 to 3, 3 to 10, 3 to 9, 3 to 8, 3 to 7, 3 to 6, 3 to 5, 3 to 4, 4 to 10, 4 to 9, 4 to 8, 4 to 7, 4 to 6, 4 to 5, 5 to 10, 5 to 9, 5 to 8, 5 to 7, 5 to 6, 6 to 10, 6 to 9, 6 to 8, 6 to 7, 7 to 10, 7 to 9, 7 to 8, 8 to 10, 8 to 9, 9 to 10, 1, 2, 3, 4, 5, 6, 7, 8, 9, or 10 times per month.

[0249] In some embodiments, the microbial composition is administered 1 to 10, 1 to 9, 1 to 8, 1 to 7, 1 to 6, 1 to 5, 1 to 4, 1 to 3, 1 to 2, 2 to 10, 2 to 9, 2 to 8, 2 to 7, 2 to 6, 2 to 5, 2 to 4, 2 to 3, 3 to 10, 3 to 9, 3 to 8, 3 to 7, 3 to 6, 3 to 5, 3 to 4, 4 to 10, 4 to 9, 4 to 8, 4 to 7, 4 to 6, 4 to 5, 5 to 10, 5 to 9, 5 to 8, 5 to 7, 5 to 6, 6 to 10, 6 to 9, 6 to 8, 6 to 7, 7 to 10, 7 to 9, 7 to 8, 8 to 10, 8 to 9, 9 to 10, 1, 2, 3, 4, 5, 6, 7, 8, 9, or 10 times per year.

[0250] In some embodiments, the feed can be uniformly coated with one or more layers of the microbes and/or microbial compositions disclosed herein, using conventional methods of mixing, spraying, or a combination thereof through the use of treatment application equipment that is specifically designed and manufactured to accurately, safely, and efficiently apply coatings. Such equipment uses various types of coating technology such as rotary coaters, drum coaters, fluidized bed techniques, spouted beds, rotary mists, or a combination thereof. Liquid treatments such as those of the present disclosure can be applied via either a spinning “atomizer” disk or a spray nozzle, which evenly distributes the microbial composition onto the feed as it moves though the spray pattern. In some aspects, the feed is then mixed or tumbled for an additional period of time to achieve additional treatment distribution and drying.

[0251] In some embodiments, the feed coats of the present disclosure can be up to 10 μm, 20 μm, 30 μm, 40 μm, 50 μm, 60 μm, 70 μm, 80 μm, 90 μm, 100 μm, 110 μm, 120 μm, 130 μm, 140 μm, 150 μm, 160 μm, 170 μm, 180 μm, 190 μm, 200 μm, 210 μm, 220 μm, 230 μm, 240 μm, 250 μm, 260 μm, 270 μm, 280 μm, 290 μm, 300 μm, 310 μm, 320 μm, 330 μm, 340 μm, 350 μm, 360 μm, 370 μm, 380 μm, 390 μm, 400 μm, 410 μm, 420 μm, 430 μm, 440 μm, 450 μm, 460 μm, 470 μm, 480 μm, 490 μm, 500 μm, 510 μm, 520 μm, 530 μm, 540 μm, 550 μm, 560 μm, 570 μm, 580 μm, 590 μm, 600 μm, 610 μm, 620 μm, 630 μm, 640 μm, 650 μm, 660 μm, 670 μm, 680 μm, 690 μm, 700 μm, 710 μm, 720 μm, 730 μm, 740 μm, 750 μm, 760 μm, 770 μm, 780 μm, 790 μm, 800 μm, 810 μm, 820 μm, 830 μm, 840 μm, 850 μm, 860 μm, 870 μm, 880 μm, 890 μm, 900 μm, 910 μm, 920 μm, 930 μm, 940 μm, 950 μm, 960 μm, 970 μm, 980 μm, 990 μm, 1000 μm, 1010 μm, 1020 μm, 1030 μm, 1040 μm, 1050 μm, 1060 μm, 1070 μm, 1080 μm, 1090 μm, 1100 μm, 1110 μm, 1120 μm, 1130 μm, 1140 μm, 1150 μm, 1160 μm, 1170 μm, 1180 μm, 1190 μm, 1200 μm, 1210 μm, 1220 μm, 1230 μm, 1240 μm, 1250 μm, 1260 μm, 1270 μm, 1280 μm, 1290 μm, 1300 μm, 1310 μm, 1320 μm, 1330 μm, 1340 μm, 1350 μm, 1360 μm, 1370 μm, 1380 μm, 1390 μm, 1400 μm, 1410 μm, 1420 μm, 1430 μm, 1440 μm, 1450 μm, 1460 μm, 1470 μm, 1480 μm, 1490 μm, 1500 μm, 1510 μm, 1520 μm, 1530 μm, 1540 μm, 1550 μm, 1560 μm, 1570 μm, 1580 μm, 1590 μm, 1600 μm, 1610 μm, 1620 μm, 1630 μm, 1640 μm, 1650 μm, 1660 μm, 1670 μm, 1680 μm, 1690 μm, 1700 μm, 1710 μm, 1720 μm, 1730 μm, 1740 μm, 1750 μm, 1760 μm, 1770 μm, 1780 μm, 1790 μm, 1800 μm, 1810 μm, 1820 μm, 1830 μm, 1840 μm, 1850 μm, 1860 μm, 1870 μm, 1880 μm, 1890 μm, 1900 μm, 1910 μm, 1920 μm, 1930 μm, 1940 μm, 1950 μm, 1960 μm, 1970 μm, 1980 μm, 1990 μm, 2000 μm, 2010 μm, 2020 μm, 2030 μm, 2040 μm, 2050 μm, 2060 μm, 2070 μm, 2080 μm, 2090 μm, 2100 μm, 2110 μm, 2120 μm, 2130 μm, 2140 μm, 2150 μm, 2160 μm, 2170 μm, 2180 μm, 2190 μm, 2200 μm, 2210 μm, 2220 μm, 2230 μm, 2240 μm, 2250 μm, 2260 μm, 2270 μm, 2280 μm, 2290 μm, 2300 μm, 2310 μm, 2320 μm, 2330 μm, 2340 μm, 2350 μm, 2360 μm, 2370 μm, 2380 μm, 2390 μm, 2400 μm, 2410 μm, 2420 μm, 2430 μm, 2440 μm, 2450 μm, 2460 μm, 2470 μm, 2480 μm, 2490 μm, 2500 μm, 2510 μm, 2520 μm, 2530 μm, 2540 μm, 2550 μm, 2560 μm, 2570 μm, 2580 μm, 2590 μm, 2600 μm, 2610 μm, 2620 μm, 2630 μm, 2640 μm, 2650 μm, 2660 μm, 2670 μm, 2680 μm, 2690 μm, 2700 μm, 2710 μm, 2720 μm, 2730 μm, 2740 μm, 2750 μm, 2760 μm, 2770 μm, 2780 μm, 2790 μm, 2800 μm, 2810 μm, 2820 μm, 2830 μm, 2840 μm, 2850 μm, 2860 μm, 2870 μm, 2880 μm, 2890 μm, 2900 μm, 2910 μm, 2920 μm, 2930 μm, 2940 μm, 2950 μm, 2960 μm, 2970 μm, 2980 μm, 2990 μm, or 3000 μm thick.

[0252] In some embodiments, the microbial cells can be coated freely onto any number of compositions or they can be formulated in a liquid or solid composition before being coated onto a composition. For example, a solid composition comprising the microorganisms can be prepared by mixing a solid carrier with a suspension of the spores until the solid carriers are impregnated with the spore or cell suspension. This mixture can then be dried to obtain the desired particles.

[0253] In some other embodiments, it is contemplated that the solid or liquid microbial compositions of the present disclosure further contain functional agents e.g., activated carbon, minerals, vitamins, and other agents capable of improving the quality of the products or a combination thereof.

[0254] Methods of coating and compositions in use of said methods that are known in the art can be particularly useful when they are modified by the addition of one of the embodiments of the present disclosure. Such coating methods and apparatus for their application are disclosed in, for example: U.S. Pat. Nos. 8,097,245, and 7,998,502; and PCT Pat. App. Publication Nos. WO 2008/076975, WO 2010/138522, WO 2011/094469, WO 2010/111347, and WO 2010/111565 each of which is incorporated by reference herein.

[0255] In some embodiments, the microbes or microbial consortia of the present disclosure exhibit a synergistic effect, on one or more of the traits described herein, in the presence of one or more of the microbes or consortia coming into contact with one another. The synergistic effect obtained by the taught methods can be quantified, for example, according to Colby's formula (i.e., (E)=X+Y−(X*Y/100)). See Colby, R. S., “Calculating Synergistic and Antagonistic Responses of Herbicide Combinations,” 1967. Weeds. Vol. 15, pp. 20-22, incorporated herein by reference in its entirety. Thus, “synergistic” is intended to reflect an outcome/parameter/effect that has been increased by more than an additive amount.

[0256] In some embodiments, the microbes or microbial consortia of the present disclosure may be administered via bolus. In one embodiment, a bolus (e.g., capsule containing the composition) is inserted into a bolus gun, and the bolus gun is inserted into the buccal cavity and/or esophagas of the animal, followed by the release/injection of the bolus into the animal's digestive tract. In one embodiment, the bolus gun/applicator is a BOVIKALC bolus gun/applicator. In another embodiment, the bolus gun/applicator is a QUADRICAL gun/applicator.

[0257] In some embodiments, the microbes or microbial consortia of the present disclosure may be administered via drench. In one embodiment, the drench is an oral drench. A drench administration comprises utilizing a drench kit/applicator/syringe that injects/releases a liquid comprising the microbes or microbial consortia into the buccal cavity and/or esophagas of the animal.

[0258] In some embodiments, the microbes or microbial consortia of the present disclosure may be administered in a time-released fashion. The composition may be coated in a chemical composition, or may be contained in a mechanical device or capsule that releases the microbes or microbial consortia over a period of time instead all at once. In one embodiment, the microbes or microbial consortia are administered to an animal in a time-release capsule. In one embodiment, the composition may be coated in a chemical composition, or may be contained in a mechanical device or capsule that releases the microbes or microbial consortia all at once a period of time hours post ingestion.

[0259] In some embodiments, the microbes or microbial consortia are administered in a time-released fashion between 1 to 5, 1 to 10, 1 to 15, 1 to 20, 1 to 24, 1 to 25, 1 to 30, 1 to 35, 1 to 40, 1 to 45, 1 to 50, 1 to 55, 1 to 60, 1 to 65, 1 to 70, 1 to 75, 1 to 80, 1 to 85, 1 to 90, 1 to 95, or 1 to 100 hours.

[0260] In some embodiments, the microbes or microbial consortia are administered in a time-released fashion between 1 to 2, 1 to 3, 1 to 4, 1 to 5, 1 to 6, 1 to 7, 1 to 8, 1 to 9, 1 to 10, 1 to 11, 1 to 12, 1 to 13, 1 to 14, 1 to 15, 1 to 16, 1 to 17, 1 to 18, 1 to 19, 1 to 20, 1 to 21, 1 to 22, 1 to 23, 1 to 24, 1 to 25, 1 to 26, 1 to 27, 1 to 28, 1 to 29, or 1 to 30 days.

### Microorganisms

[0261] As used herein the term “microorganism” should be taken broadly. It includes, but is not limited to, the two prokaryotic domains, Bacteria and Archaea, as well as eukaryotic fungi, protists, and viruses.

[0262] By way of example, the microorganisms may include species of the genera of: Clostridium, Ruminococcus, Roseburia, Hydrogenoanaerobacterium, Saccharofermentans, Papillibacter, Pelotomaculum, Butyricicoccus, Tannerella, Prevotella, Butyricimonas, Piromyces, Pichia, Candida, Vrystaatia, Orpinomyces, Neocallimastix, and Phyllosticta. The microorganisms may further include species belonging to the family of Lachnospiraceae, and the order of Saccharomycetales. In some embodiments, the microorganisms may include species of any genera disclosed herein.

[0263] In certain embodiments, the microorganism is unculturable. This should be taken to mean that the microorganism is not known to be culturable or is difficult to culture using methods known to one skilled in the art.

[0264] In one embodiment, the microbes are obtained from animals (e.g., mammals, reptiles, birds, and the like), soil (e.g., rhizosphere), air, water (e.g., marine, freshwater, wastewater sludge), sediment, oil, plants (e.g., roots, leaves, stems), agricultural products, and extreme environments (e.g., acid mine drainage or hydrothermal systems). In a further embodiment, microbes obtained from marine or freshwater environments such as an ocean, river, or lake. In a further embodiment, the microbes can be from the surface of the body of water, or any depth of the body of water (e.g., a deep sea sample).

[0265] The microorganisms of the disclosure may be isolated in substantially pure or mixed cultures. They may be concentrated, diluted, or provided in the natural concentrations in which they are found in the source material. For example, microorganisms from saline sediments may be isolated for use in this disclosure by suspending the sediment in fresh water and allowing the sediment to fall to the bottom. The water containing the bulk of the microorganisms may be removed by decantation after a suitable period of settling and either administered to the GI tract of an ungulate, or concentrated by filtering or centrifugation, diluted to an appropriate concentration and administered to the GI tract of an ungulate with the bulk of the salt removed. By way of further example, microorganisms from mineralized or toxic sources may be similarly treated to recover the microbes for application to the ungulate to minimize the potential for damage to the animal.

[0266] In another embodiment, the microorganisms are used in a crude form, in which they are not isolated from the source material in which they naturally reside. For example, the microorganisms are provided in combination with the source material in which they reside; for example, fecal matter, cud, or other composition found in the gastrointestinal tract. In this embodiment, the source material may include one or more species of microorganisms.

[0267] In some embodiments, a mixed population of microorganisms is used in the methods of the disclosure.

[0268] In embodiments of the disclosure where the microorganisms are isolated from a source material (for example, the material in which they naturally reside), any one or a combination of a number of standard techniques which will be readily known to skilled persons may be used. However, by way of example, these in general employ processes by which a solid or liquid culture of a single microorganism can be obtained in a substantially pure form, usually by physical separation on the surface of a solid microbial growth medium or by volumetric dilutive isolation into a liquid microbial growth medium. These processes may include isolation from dry material, liquid suspension, slurries or homogenates in which the material is spread in a thin layer over an appropriate solid gel growth medium, or serial dilutions of the material made into a sterile medium and inoculated into liquid or solid culture media.

[0269] Whilst not essential, in one embodiment, the material containing the microorganisms may be pre-treated prior to the isolation process in order to either multiply all microorganisms in the material. Microorganisms can then be isolated from the enriched materials as disclosed above.

[0270] In certain embodiments, as mentioned herein before, the microorganism(s) may be used in crude form and need not be isolated from an animal or a media. For example, cud, feces, or growth media which includes the microorganisms identified to be of benefit to increased milk production in ungulates may be obtained and used as a crude source of microorganisms for the next round of the method or as a crude source of microorganisms at the conclusion of the method. For example, fresh feces could be obtained and optionally processed.

### Microbiome Shift and Abundance of Microbes

[0271] In some embodiments, the microbiome of a ruminant, including the rumen microbiome, comprises a diverse arrive of microbes with a wide variety of metabolic capabilities. The microbiome is influenced by a range of factors including diet, variations in animal metabolism, and breed, among others. Most bovine diets are plant-based and rich in complex polysaccharides that enrich the gastrointestinal microbial community for microbes capable of breaking down specific polymeric components in the diet. The end products of primary degradation sustains a chain of microbes that ultimately produce a range of organic acids together with hydrogen and carbon dioxide. Because of the complex and interlinked nature of the microbiome, changing the diet and thus substrates for primary degradation may have a cascading effect on rumen microbial metabolism, with changes in both the organic acid profiles and the methane levels produced, thus impacting the quality and quantity of animal production and or the products produced by the animal. See Menezes et al. (2011. FEMS Microbiol. Ecol. 78(2).256-265.)

[0272] In some aspects, the present disclosure is drawn to administering microbial compositions described herein to modulate or shift the microbiome of a ruminant.

[0273] In some embodiments, the microbiome is shifted through the administration of one or more microbes to the gastrointestinal tract. In further embodiments, the one or more microbes are those selected from Table 1, 3 or 14. In some embodiments, the microbiome shift or modulation includes a decrease or loss of specific microbes that were present prior to the administration of one or more microbes of the present disclosure. In some embodiments, the microbiome shift or modulation includes an increase in microbes that were present prior to the administration of one or more microbes of the present disclosure. In some embodiments, the microbiome shift or modulation includes a gain of one or more microbes that were not present prior to the administration of one or more microbes of the present disclosure. In a further embodiment, the gain of one or more microbes is a microbe that was not specifically included in the administered microbial consortium.

[0274] In some embodiments, the administration of microbes of the present disclosure results in a sustained modulation of the microbiome such that the administered microbes are present in the microbiome for a period of at least 1 to 10, 1 to 9, 1 to 8, 1 to 7, 1 to 6, 1 to 5, 1 to 4, 1 to 3, 1 to 2, 2 to 10, 2 to 9, 2 to 8, 2 to 7, 2 to 6, 2 to 5, 2 to 4, 2 to 3, 3 to 10, 3 to 9, 3 to 8, 3 to 7, 3 to 6, 3 to 5, 3 to 4, 4 to 10, 4 to 9, 4 to 8, 4 to 7, 4 to 6, 4 to 5, 5 to 10, 5 to 9, 5 to 8, 5 to 7, 5 to 6, 6 to 10, 6 to 9, 6 to 8, 6 to 7, 7 to 10, 7 to 9, 7 to 8, 8 to 10, 8 to 9, 9 to 10, 1, 2, 3, 4, 5, 6, 7, 8, 9, or 10 days.

[0275] In some embodiments, the administration of microbes of the present disclosure results in a sustained modulation of the microbiome such that the administered microbes are present in the microbiome for a period of at least 1 to 10, 1 to 9, 1 to 8, 1 to 7, 1 to 6, 1 to 5, 1 to 4, 1 to 3, 1 to 2, 2 to 10, 2 to 9, 2 to 8, 2 to 7, 2 to 6, 2 to 5, 2 to 4, 2 to 3, 3 to 10, 3 to 9, 3 to 8, 3 to 7, 3 to 6, 3 to 5, 3 to 4, 4 to 10, 4 to 9, 4 to 8, 4 to 7, 4 to 6, 4 to 5, 5 to 10, 5 to 9, 5 to 8, 5 to 7, 5 to 6, 6 to 10, 6 to 9, 6 to 8, 6 to 7, 7 to 10, 7 to 9, 7 to 8, 8 to 10, 8 to 9, 9 to 10, 1, 2, 3, 4, 5, 6, 7, 8, 9, or 10 weeks.

[0276] In some embodiments, the administration of microbes of the present disclosure results in a sustained modulation of the microbiome such that the administered microbes are present in the microbiome for a period of at least 1 to 10, 1 to 9, 1 to 8, 1 to 7, 1 to 6, 1 to 5, 1 to 4, 1 to 3, 1 to 2, 2 to 10, 2 to 9, 2 to 8, 2 to 7, 2 to 6, 2 to 5, 2 to 4, 2 to 3, 3 to 10, 3 to 9, 3 to 8, 3 to 7, 3 to 6, 3 to 5, 3 to 4, 4 to 10, 4 to 9, 4 to 8, 4 to 7, 4 to 6, 4 to 5, 5 to 10, 5 to 9, 5 to 8, 5 to 7, 5 to 6, 6 to 10, 6 to 9, 6 to 8, 6 to 7, 7 to 10, 7 to 9, 7 to 8, 8 to 10, 8 to 9, 9 to 10, 1, 2, 3, 4, 5, 6, 7, 8, 9, 10, 11, or 12 months.

[0277] In some embodiments, the presence of the administered microbes are detected by sampling the gastrointestinal tract and using primers to amplify the 16S or 18S rDNA sequences, or the ITS rDNA sequences of the administered microbes. In some embodiments, the administered microbes are one or more of those selected from Table 1, 3 or 14, and the corresponding rDNA sequences are those selected from SEQ ID NOs:1-60, SEQ ID NOs: 2045-2108 and the SEQ ID NOs identified in Table 3. In some embodiments, the administered microbes are any one of SEQ ID NOs: 2125-4945.

[0278] In some embodiments, the microbiome of a ruminant is measured by amplifying polynucleotides collected from gastrointestinal samples, wherein the polynucleotides may be 16S or 18S rDNA fragments, or ITS rDNA fragments of microbial rDNA. In one embodiment, the microbiome is fingerprinted by a method of denaturing gradient gel electrophoresis (DGGE) wherein the amplified rDNA fragments are sorted by where they denature, and form a unique banding pattern in a gel that may be used for comparing the microbiome of the same ruminant over time or the microbiomes of multiple ruminants. In another embodiment, the microbiome is fingerprinted by a method of terminal restriction fragment length polymorphism (T-RFLP), wherein labelled PCR fragments are digested using a restriction enzyme and then sorted by size. In a further embodiment, the data collected from the T-RFLP method is evaluated by nonmetric multidimensional scaling (nMDS) ordination and PERMANOVA statistics identify differences in microbiomes, thus allowing for the identification and measurement of shifts in the microbiome. See also Shanks et al. (2011. Appl. Environ. Microbiol. 77(9):2992-3001), Petri et al. (2013. PLOS one. 8(12):e83424), and Menezes et al. (2011. FEMS Microbiol. Ecol. 78(2):256-265.)

[0279] In some embodiments, the administration of microbes of the present disclosure results in a modulation or shift of the microbiome which further results in a desired phenotype or improved trait.

[0280] According to the methods provided herein, a sample is processed to detect the presence of one or more microorganism types in the sample (FIG. 1, 1001; FIG. 2, 2001). The absolute number of one or more microorganism organism type in the sample is determined (FIG. 1, 1002; FIG. 2, 2002). The determination of the presence of the one or more organism types and the absolute number of at least one organism type can be conducted in parallel or serially. For example, in the case of a sample comprising a microbial community comprising bacteria (i.e., one microorganism type) and fungi (i.e., a second microorganism type), the user in one embodiment detects the presence of one or both of the organism types in the sample (FIG. 1, 1001; FIG. 2, 2001). The user, in a further embodiment, determines the absolute number of at least one organism type in the sample—in the case of this example, the number of bacteria, fungi or combination thereof, in the sample (FIG. 1, 1002; FIG. 2, 2002).

[0281] In one embodiment, the sample, or a portion thereof is subjected to flow cytometry (FC) analysis to detect the presence and/or number of one or more microorganism types (FIG. 1, 1001, 1002; FIG. 2, 2001, 2002). In one flow cytometer embodiment, individual microbial cells pass through an illumination zone, at a rate of at least about 300*s⁻¹, or at least about 500*s⁻¹ or at least about 1000*s⁻¹. However, one of ordinary skill in the art will recognize that this rate can vary depending on the type of instrument is employed. Detectors which are gated electronically measure the magnitude of a pulse representing the extent of light scattered. The magnitudes of these pulses are sorted electronically into “bins” or “channels,” permitting the display of histograms of the number of cells possessing a certain quantitative property (e.g., cell staining property, diameter, cell membrane) versus the channel number. Such analysis allows for the determination of the number of cells in each “bin” which in embodiments described herein is an “microorganism type” bin, e.g., a bacteria, fungi, nematode, protozoan, archaea, algae, dinoflagellate, virus, viroid, etc.

[0282] In one embodiment, a sample is stained with one or more fluorescent dyes wherein a fluorescent dye is specific to a particular microorganism type, to enable detection via a flow cytometer or some other detection and quantification method that harnesses fluorescence, such as fluorescence microscopy. The method can provide quantification of the number of cells and/or cell volume of a given organism type in a sample. In a further embodiment, as described herein, flow cytometry is harnessed to determine the presence and quantity of a unique first marker and/or unique second marker of the organism type, such as enzyme expression, cell surface protein expression, etc. Two- or three-variable histograms or contour plots of, for example, light scattering versus fluorescence from a cell membrane stain (versus fluorescence from a protein stain or DNA stain) may also be generated, and thus an impression may be gained of the distribution of a variety of properties of interest among the cells in the population as a whole. A number of displays of such multiparameter flow cytometric data are in common use and are amenable for use with the methods described herein.

[0283] In one embodiment of processing the sample to detect the presence and number of one or more microorganism types, a microscopy assay is employed (FIG. 1, 1001, 1002). In one embodiment, the microscopy is optical microscopy, where visible light and a system of lenses are used to magnify images of small samples. Digital images can be captured by a charge-couple device (CCD) camera. Other microscopic techniques include, but are not limited to, scanning electron microscopy and transmission electron microscopy. Microorganism types are visualized and quantified according to the aspects provided herein.

[0284] In another embodiment of in order to detect the presence and number of one or more microorganism types, the sample, or a portion thereof is subjected to fluorescence microscopy. Different fluorescent dyes can be used to directly stain cells in samples and to quantify total cell counts using an epifluorescence microscope as well as flow cytometry, described above. Useful dyes to quantify microorganisms include but are not limited to acridine orange (AO), 4,6-di-amino-2 phenylindole (DAPI) and 5-cyano-2,3 Dytolyl Tetrazolium Chloride (CTC). Viable cells can be estimated by a viability staining method such as the LIVE/DEAD® Bacterial Viability Kit (Bac-Light™) which contains two nucleic acid stains: the green-fluorescent SYTO 9™ dye penetrates all membranes and the red-fluorescent propidium iodide (PI) dye penetrates cells with damaged membranes. Therefore, cells with compromised membranes will stain red, whereas cells with undamaged membranes will stain green. Fluorescent in situ hybridization (FISH) extends epifluorescence microscopy, allowing for the fast detection and enumeration of specific organisms. FISH uses fluorescent labelled oligonucleotides probes (usually 15-25 basepairs) which bind specifically to organism DNA in the sample, allowing the visualization of the cells using an epifluorescence or confocal laser scanning microscope (CLSM). Catalyzed reporter deposition fluorescence in situ hybridization (CARD-FISH) improves upon the FISH method by using oligonucleotide probes labelled with a horse radish peroxidase (HRP) to amplify the intensity of the signal obtained from the microorganisms being studied. FISH can be combined with other techniques to characterize microorganism communities. One combined technique is high affinity peptide nucleic acid (PNA)-FISH, where the probe has an enhanced capability to penetrate through the Extracellular Polymeric Substance (EPS) matrix. Another example is LIVE/DEAD-FISH which combines the cell viability kit with FISH and has been used to assess the efficiency of disinfection in drinking water distribution systems.

[0285] In another embodiment, the sample, or a portion thereof is subjected to Raman micro-spectroscopy in order to determine the presence of a microorganism type and the absolute number of at least one microorganism type (FIG. 1, 1001-1002; FIG. 2, 2001-2002). Raman micro-spectroscopy is a non-destructive and label-free technology capable of detecting and measuring a single cell Raman spectrum (SCRS). A typical SCRS provides an intrinsic biochemical “fingerprint” of a single cell. A SCRS contains rich information of the biomolecules within it, including nucleic acids, proteins, carbohydrates and lipids, which enables characterization of different cell species, physiological changes and cell phenotypes. Raman microscopy examines the scattering of laser light by the chemical bonds of different cell biomarkers. A SCRS is a sum of the spectra of all the biomolecules in one single cell, indicating a cell's phenotypic profile. Cellular phenotypes, as a consequence of gene expression, usually reflect genotypes. Thus, under identical growth conditions, different microorganism types give distinct SCRS corresponding to differences in their genotypes and can thus be identified by their Raman spectra.

[0286] In yet another embodiment, the sample, or a portion thereof is subjected to centrifugation in order to determine the presence of a microorganism type and the number of at least one microorganism type (FIG. 1, 1001-1002; FIG. 2, 2001-2002). This process sediments a heterogeneous mixture by using the centrifugal force created by a centrifuge. More dense components of the mixture migrate away from the axis of the centrifuge, while less dense components of the mixture migrate towards the axis. Centrifugation can allow fractionation of samples into cytoplasmic, membrane and extracellular portions. It can also be used to determine localization information for biological molecules of interest. Additionally, centrifugation can be used to fractionate total microbial community DNA. Different prokaryotic groups differ in their guanine-plus-cytosine (G+C) content of DNA, so density-gradient centrifugation based on G+C content is a method to differentiate organism types and the number of cells associated with each type. The technique generates a fractionated profile of the entire community DNA and indicates abundance of DNA as a function of G+C content. The total community DNA is physically separated into highly purified fractions, each representing a different G+C content that can be analyzed by additional molecular techniques such as denaturing gradient gel electrophoresis (DGGE)/amplified ribosomal DNA restriction analysis (ARDRA) (see discussion herein) to assess total microbial community diversity and the presence/quantity of one or more microorganism types.

[0287] In another embodiment, the sample, or a portion thereof is subjected to staining in order to determine the presence of a microorganism type and the number of at least one microorganism type (FIG. 1, 1001-1002; FIG. 2, 2001-2002). Stains and dyes can be used to visualize biological tissues, cells or organelles within cells. Staining can be used in conjunction with microscopy, flow cytometry or gel electrophoresis to visualize or mark cells or biological molecules that are unique to different microorganism types. In vivo staining is the process of dyeing living tissues, whereas in vitro staining involves dyeing cells or structures that have been removed from their biological context. Examples of specific staining techniques for use with the methods described herein include, but are not limited to: gram staining to determine gram status of bacteria, endospore staining to identify the presence of endospores, Ziehl-Neelsen staining, haematoxylin and eosin staining to examine thin sections of tissue, papanicolaou staining to examine cell samples from various bodily secretions, periodic acid-Schiff staining of carbohydrates, Masson's trichome employing a three-color staining protocol to distinguish cells from the surrounding connective tissue, Romanowsky stains (or common variants that include Wright's stain, Jenner's stain, May-Grunwald stain, Leishman stain and Giemsa stain) to examine blood or bone marrow samples, silver staining to reveal proteins and DNA, Sudan staining for lipids and Conklin's staining to detect true endospores. Common biological stains include acridine orange for cell cycle determination; bismarck brown for acid mucins; carmine for glycogen; carmine alum for nuclei; Coomassie blue for proteins; Cresyl violet for the acidic components of the neuronal cytoplasm; Crystal violet for cell walls; DAPI for nuclei; eosin for cytoplasmic material, cell membranes, some extracellular structures and red blood cells; ethidium bromide for DNA; acid fuchsine for collagen, smooth muscle or mitochondria; haematoxylin for nuclei; Hoechst stains for DNA; iodine for starch; malachite green for bacteria in the Gimenez staining technique and for spores; methyl green for chromatin; methylene blue for animal cells; neutral red for Nissl substance; Nile blue for nuclei; Nile red for lipohilic entities; osmium tetroxide for lipids; rhodamine is used in fluorescence microscopy; safranin for nuclei. Stains are also used in transmission electron microscopy to enhance contrast and include phosphotungstic acid, osmium tetroxide, ruthenium tetroxide, ammonium molybdate, cadmium iodide, carbohydrazide, ferric chloride, hexamine, indium trichloride, lanthanum nitrate, lead acetate, lead citrate, lead(II) nitrate, periodic acid, phosphomolybdic acid, potassium ferricyanide, potassium ferrocyanide, ruthenium red, silver nitrate, silver proteinate, sodium chloroaurate, thallium nitrate, thiosemicarbazide, uranyl acetate, uranyl nitrate, and vanadyl sulfate.

[0288] In another embodiment, the sample, or a portion thereof is subjected to mass spectrometry (MS) in order to determine the presence of a microorganism type and the number of at least one microorganism type (FIG. 1, 1001-1002; FIG. 2, 2001-2002). MS, as discussed below, can also be used to detect the presence and expression of one or more unique markers in a sample (FIG. 1, 1003-1004; FIG. 2, 2003-2004). MS is used for example, to detect the presence and quantity of protein and/or peptide markers unique to microorganism types and therefore to provide an assessment of the number of the respective microorganism type in the sample. Quantification can be either with stable isotope labelling or label-free. De novo sequencing of peptides can also occur directly from MS/MS spectra or sequence tagging (produce a short tag that can be matched against a database). MS can also reveal post-translational modifications of proteins and identify metabolites. MS can be used in conjunction with chromatographic and other separation techniques (such as gas chromatography, liquid chromatography, capillary electrophoresis, ion mobility) to enhance mass resolution and determination.

[0289] In another embodiment, the sample, or a portion thereof is subjected to lipid analysis in order to determine the presence of a microorganism type and the number of at least one microorganism type (FIG. 1, 1001-1002; FIG. 2, 2001-2002). Fatty acids are present in a relatively constant proportion of the cell biomass, and signature fatty acids exist in microbial cells that can differentiate microorganism types within a community. In one embodiment, fatty acids are extracted by saponification followed by derivatization to give the respective fatty acid methyl esters (FAMEs), which are then analyzed by gas chromatography. The FAME profile in one embodiment is then compared to a reference FAME database to identify the fatty acids and their corresponding microbial signatures by multivariate statistical analyses.

[0290] In the aspects of the methods provided herein, the number of unique first makers in the sample, or portion thereof (e.g., sample aliquot) is measured, as well as the abundance of each of the unique first markers (FIG. 1, 1003; FIG. 2, 2003). A unique marker is a marker of a microorganism strain. It should be understood by one of ordinary skill in the art that depending on the unique marker being probed for and measured, the entire sample need not be analyzed. For example, if the unique marker is unique to bacterial strains, then the fungal portion of the sample need not be analyzed. As described above, in some embodiments, measuring the absolute abundance of one or more organism types in a sample comprises separating the sample by organism type, e.g., via flow cytometry.

[0291] Any marker that is unique to an organism strain can be employed herein. For example, markers can include, but are not limited to, small subunit ribosomal RNA genes (16S/18S rDNA), large subunit ribosomal RNA genes (23S/25S/28S rDNA), intercalary 5.85 gene, cytochrome c oxidase, beta-tubulin, elongation factor, RNA polymerase and internal transcribed spacer (ITS).

[0292] Ribosomal RNA genes (rDNA), especially the small subunit ribosomal RNA genes, i.e., 18S rRNA genes (18S rDNA) in the case of eukaryotes and 16S rRNA (16S rDNA) in the case of prokaryotes, have been the predominant target for the assessment of organism types and strains in a microbial community. However, the large subunit ribosomal RNA genes, 28S rDNAs, have been also targeted, rDNAs are suitable for taxonomic identification because: (i) they are ubiquitous in all known organisms; (ii) they possess both conserved and variable regions; (iii) there is an exponentially expanding database of their sequences available for comparison. In community analysis of samples, the conserved regions serve as annealing sites for the corresponding universal PCR and/or sequencing primers, whereas the variable regions can be used for phylogenetic differentiation. In addition, the high copy number of rDNA in the cells facilitates detection from environmental samples.

[0293] The internal transcribed spacer (ITS), located between the 18S rDNA and 28S rDNA, has also been targeted. The ITS is transcribed but spliced away before assembly of the ribosomes The ITS region is composed of two highly variable spacers, ITS1 and ITS2, and the intercalary 5.85 gene. This rDNA operon occurs in multiple copies in genomes. Because the ITS region does not code for ribosome components, it is highly variable.

[0294] In one embodiment, the unique RNA marker can be an mRNA marker, an siRNA marker or a ribosomal RNA marker.

[0295] Protein-coding functional genes can also be used herein as a unique first marker. Such markers include but are not limited to: the recombinase A gene family (bacterial RecA, archaea RadA and RadB, eukaryotic Rad51 and Rad57, phage UvsX); RNA polymerase β subunit (RpoB) gene, which is responsible for transcription initiation and elongation; chaperonins. Candidate marker genes have also been identified for bacteria plus archaea: ribosomal protein S2 (rpsB), ribosomal protein S10 (rpsJ), ribosomal protein L1 rplA), translation elongation factor EF-2, translation initiation factor IF-2, metalloendopeptidase, ribosomal protein L22, ffh signal recognition particle protein, ribosomal protein L4/Lle (rplD), ribosomal protein L2 (rplB), ribosomal protein S9 (rpsI), ribosomal protein L3 (rplC), phenylalanyl-tRNA synthetase beta subunit, ribosomal protein L14b/L23e (rplN), ribosomal protein S5, ribosomal protein S19 (rpsS), ribosomal protein S7, ribosomal protein L16/L10E (rplP), ribosomal protein S13 (rpsM), phenylalanyl-tRNA synthetase a subunit, ribosomal protein L15, ribosomal protein L25/L23, ribosomal protein L6 (rplF), ribosomal protein L11 (rplK), ribosomal protein L5 (rplE), ribosomal protein S12/S23, ribosomal protein L29, ribosomal protein S3 (rpsC), ribosomal protein S11 (rpsK), ribosomal protein L10, ribosomal protein S8, tRNA pseudouridine synthase B, ribosomal protein L18P/L5E, ribosomal protein S15P/S13e, Porphobilinogen deaminase, ribosomal protein S17, ribosomal protein L13 (rplM), phosphoribosylformylglycinamidine cyclo-ligase (rpsE), ribonuclease HII and ribosomal protein L24. Other candidate marker genes for bacteria include: transcription elongation protein NusA (nusA), rpoB DNA-directed RNA polymerase subunit beta (rpoB), GTP-binding protein EngA, rpoC DNA-directed RNA polymerase subunit beta′, priA primosome assembly protein, transcription-repair coupling factor, CTP synthase (pyrG), secY preprotein translocase subunit SecY, GTP-binding protein Obg/CgtA, DNA polymerase I, rpsF 30S ribosomal protein S6, poA DNA-directed RNA polymerase subunit alpha, peptide chain release factor 1, rplI 50S ribosomal protein L9, polyribonucleotide nucleotidyltransferase, tsf elongation factor Ts (tsf), rplQ 50S ribosomal protein L17, tRNA (guanine-N(1)-)-methyltransferase (rplS), rplY probable 50S ribosomal protein L25, DNA repair protein RadA, glucose-inhibited division protein A, ribosome-binding factor A, DNA mismatch repair protein MutL, smpB SsrA-binding protein (smpB), N-acetylglucosaminyl transferase, S-adenosyl-methyltransferase MraW, UDP-N-acetylmuramoylalanine-D-glutamate ligase, rplS 50S ribosomal protein L19, rplT 50S ribosomal protein L20 (rplT), ruvA Holliday junction DNA helicase, ruvB Holliday junction DNA helicase B, serS seryl-tRNA synthetase, rplU 50S ribosomal protein L21, rpsR 30S ribosomal protein S18, DNA mismatch repair protein MutS, rpsT 30S ribosomal protein S20, DNA repair protein RecN, frr ribosome recycling factor (frr), recombination protein RecR, protein of unknown function UPF0054, miaA tRNA isopentenyltransferase, GTP-binding protein YchF, chromosomal replication initiator protein DnaA, dephospho-CoA kinase, 16S rRNA processing protein RimM, ATP-cone domain protein, 1-deoxy-D-xylulose 5-phosphate reductoisomerase, 2C-methyl-D-erythritol 2,4-cyclodiphosphate synthase, fatty acid/phospholipid synthesis protein PlsX, tRNA(Ile)-lysidine synthetase, dnaG DNA primase (dnaG), ruvC Holliday junction resolvase, rpsP 30S ribosomal protein 516, Recombinase A recA, riboflavin biosynthesis protein RibF, glycyl-tRNA synthetase beta subunit, trmU tRNA (5-methylaminomethyl-2-thiouridylate)-methyltransferase, rpmI 50S ribosomal protein L35, hemE uroporphyrinogen decarboxylase, Rod shape-determining protein, rpmA 50S ribosomal protein L27 (rpmA), peptidyl-tRNA hydrolase, translation initiation factor IF-3 (infC), UDP-N-acetylmuramyl-tripeptide synthetase, rpmF 50S ribosomal protein L32, rpIL 50S ribosomal protein L7/L12 (rpIL), leuS leucyl-tRNA synthetase, ligA NAD-dependent DNA ligase, cell division protein FtsA, GTP-binding protein TypA, ATP-dependent Clp protease, ATP-binding subunit ClpX, DNA replication and repair protein RecF and UDP-N-acetylenolpyruvoylglucosamine reductase.

[0296] Phospholipid fatty acids (PLFAs) may also be used as unique first markers according to the methods described herein. Because PLFAs are rapidly synthesized during microbial growth, are not found in storage molecules and degrade rapidly during cell death, it provides an accurate census of the current living community. All cells contain fatty acids (FAs) that can be extracted and esterified to form fatty acid methyl esters (FAMEs). When the FAMEs are analyzed using gas chromatography-mass spectrometry, the resulting profile constitutes a ‘fingerprint’ of the microorganisms in the sample. The chemical compositions of membranes for organisms in the domains Bacteria and Eukarya are comprised of fatty acids linked to the glycerol by an ester-type bond (phospholipid fatty acids (PLFAs)). In contrast, the membrane lipids of Archaea are composed of long and branched hydrocarbons that are joined to glycerol by an ether-type bond (phospholipid ether lipids (PLELs)). This is one of the most widely used non-genetic criteria to distinguish the three domains. In this context, the phospholipids derived from microbial cell membranes, characterized by different acyl chains, are excellent signature molecules, because such lipid structural diversity can be linked to specific microbial taxa.

[0297] As provided herein, in order to determine whether an organism strain is active, the level of expression of one or more unique second markers, which can be the same or different as the first marker, is measured (FIG. 1, 1004; FIG. 2, 2004). Unique first unique markers are described above. The unique second marker is a marker of microorganism activity. For example, in one embodiment, the mRNA or protein expression of any of the first markers described above is considered a unique second marker for the purposes of this invention.

[0298] In one embodiment, if the level of expression of the second marker is above a threshold level (e.g., a control level) or at a threshold level, the microorganism is considered to be active (FIG. 1, 1005; FIG. 2, 2005). Activity is determined in one embodiment, if the level of expression of the second marker is altered by at least about 5%, at least about 10%, at least about 15%, at least about 20%, at least about 25%, or at least about 30%, as compared to a threshold level, which in some embodiments, is a control level.

[0299] Second unique markers are measured, in one embodiment, at the protein, RNA or metabolite level. A unique second marker is the same or different as the first unique marker.

[0300] As provided above, a number of unique first markers and unique second markers can be detected according to the methods described herein. Moreover, the detection and quantification of a unique first marker is carried out according to methods known to those of ordinary skill in the art (FIG. 1, 1003-1004, FIG. 2, 2003-2004).

[0301] Nucleic acid sequencing (e.g., gDNA, cDNA, rRNA, mRNA) in one embodiment is used to determine absolute abundance of a unique first marker and/or unique second marker. Sequencing platforms include, but are not limited to, Sanger sequencing and high-throughput sequencing methods available from Roche/454 Life Sciences, Illumina/Solexa, Pacific Biosciences, Ion Torrent and Nanopore. The sequencing can be amplicon sequencing of particular DNA or RNA sequences or whole metagenome/transcriptome shotgun sequencing.

[0302] Traditional Sanger sequencing (Sanger et al. (1977) DNA sequencing with chain-terminating inhibitors. Proc Natl. Acad. Sci. USA, 74, pp. 5463-5467, incorporated by reference herein in its entirety) relies on the selective incorporation of chain-terminating dideoxynucleotides by DNA polymerase during in vitro DNA replication and is amenable for use with the methods described herein.

[0303] In another embodiment, the sample, or a portion thereof is subjected to extraction of nucleic acids, amplification of DNA of interest (such as the rRNA gene) with suitable primers and the construction of clone libraries using sequencing vectors. Selected clones are then sequenced by Sanger sequencing and the nucleotide sequence of the DNA of interest is retrieved, allowing calculation of the number of unique microorganism strains in a sample.

[0304] 454 pyrosequencing from Roche/454 Life Sciences yields long reads and can be harnessed in the methods described herein (Margulies et al. (2005) Nature, 437, pp. 376-380; U.S. Pat. Nos. 6,274,320; 6,258,568; 6,210,891, each of which is herein incorporated in its entirety for all purposes). Nucleic acid to be sequenced (e.g., amplicons or nebulized genomic/metagenomic DNA) have specific adapters affixed on either end by PCR or by ligation. The DNA with adapters is fixed to tiny beads (ideally, one bead will have one DNA fragment) that are suspended in a water-in-oil emulsion. An emulsion PCR step is then performed to make multiple copies of each DNA fragment, resulting in a set of beads in which each bead contains many cloned copies of the same DNA fragment. Each bead is then placed into a well of a fiber-optic chip that also contains enzymes necessary for the sequencing-by-synthesis reactions. The addition of bases (such as A, C, G, or T) trigger pyrophosphate release, which produces flashes of light that are recorded to infer the sequence of the DNA fragments in each well. About 1 million reads per run with reads up to 1,000 bases in length can be achieved. Paired-end sequencing can be done, which produces pairs of reads, each of which begins at one end of a given DNA fragment. A molecular barcode can be created and placed between the adapter sequence and the sequence of interest in multiplex reactions, allowⁱng each sequence to be assigned to a sample bioinformatically.

[0305] Illumina/Solexa sequencing produces average read lengths of about 25 basepairs (bp) to about 300 bp (Bennett et al. (2005) Pharmacogenomics, 6:373-382; Lange et al. (2014). BMC Genomics 15, p. 63; Fadrosh et al. (2014) Microbiome 2, p. 6; Caporaso et al. (2012) ISME J, 6, p. 1621-1624; Bentley et al. (2008) Accurate whole human genome sequencing using reversible terminator chemistry. Nature, 456:53-59). This sequencing technology is also sequencing-by-synthesis but employs reversible dye terminators and a flow cell with a field of oligos attached. DNA fragments to be sequenced have specific adapters on either end and are washed over a flow cell filled with specific oligonucleotides that hybridize to the ends of the fragments. Each fragment is then replicated to make a cluster of identical fragments. Reversible dye-terminator nucleotides are then washed over the flow cell and given time to attach. The excess nucleotides are washed away, the flow cell is imaged, and the reversible terminators can be removed so that the process can repeat and nucleotides can continue to be added in subsequent cycles. Paired-end reads that are 300 bases in length each can be achieved. An Illumina platform can produce 4 billion fragments in a paired-end fashion with 125 bases for each read in a single run. Barcodes can also be used for sample multiplexing, but indexing primers are used.

[0306] The SOLiD (Sequencing by Oligonucleotide Ligation and Detection, Life Technologies) process is a “sequencing-by-ligation” approach, and can be used with the methods described herein for detecting the presence and abundance of a first marker and/or a second marker (FIG. 1, 1003-1004; FIG. 2, 2003-2004) (Peckham et al. SOLiD™ Sequencing and 2-Base Encoding. San Diego, CA: American Society of Human Genetics, 2007; Mitra et al. (2013) Analysis of the intestinal microbiota using SOLiD 16S rRNA gene sequencing and SOLiD shotgun sequencing. BMC Genomics, 14(Suppl 5): S16; Mardis (2008) Next-generation DNA sequencing methods. Annu Rev Genomics Hum Genet, 9:387-402; each incorporated by reference herein in its entirety). A library of DNA fragments is prepared from the sample to be sequenced, and are used to prepare clonal bead populations, where only one species of fragment will be present on the surface of each magnetic bead. The fragments attached to the magnetic beads will have a universal P1 adapter sequence so that the starting sequence of every fragment is both known and identical. Primers hybridize to the P1 adapter sequence within the library template. A set of four fluorescently labelled di-base probes compete for ligation to the sequencing primer. Specificity of the di-base probe is achieved by interrogating every 1st and 2nd base in each ligation reaction. Multiple cycles of ligation, detection and cleavage are performed with the number of cycles determining the eventual read length. The SOLiD platform can produce up to 3 billion reads per run with reads that are 75 bases long. Paired-end sequencing is available and can be used herein, but with the second read in the pair being only 35 bases long. Multiplexing of samples is possible through a system akin to the one used by Illumina, with a separate indexing run.

[0307] The Ion Torrent system, like 454 sequencing, is amenable for use with the methods described herein for detecting the presence and abundance of a first marker and/or a second marker (FIG. 1, 1003-1004; FIG. 2, 2003-2004). It uses a plate of microwells containing beads to which DNA fragments are attached. It differs from all of the other systems, however, in the manner in which base incorporation is detected. When a base is added to a growing DNA strand, a proton is released, which slightly alters the surrounding pH. Microdetectors sensitive to pH are associated with the wells on the plate, and they record when these changes occur. The different bases (A, C, G, T) are washed sequentially through the wells, allowing the sequence from each well to be inferred. The Ion Proton platform can produce up to 50 million reads per run that have read lengths of 200 bases. The Personal Genome Machine platform has longer reads at 400 bases. Bidirectional sequencing is available. Multiplexing is possible through the standard in-line molecular barcode sequencing.

[0308] Pacific Biosciences (PacBio) SMRT sequencing uses a single-molecule, real-time sequencing approach and in one embodiment, is used with the methods described herein for detecting the presence and abundance of a first marker and/or a second marker (FIG. 1, 1003-1004; FIG. 2, 2003-2004). The PacBio sequencing system involves no amplification step, setting it apart from the other major next-generation sequencing systems. In one embodiment, the sequencing is performed on a chip containing many zero-mode waveguide (ZMW) detectors. DNA polymerases are attached to the ZMW detectors and phospholinked dye-labeled nucleotide incorporation is imaged in real time as DNA strands are synthesized. The PacBio system yields very long read lengths (averaging around 4,600 bases) and a very high number of reads per run (about 47,000). The typical “paired-end” approach is not used with PacBio, since reads are typically long enough that fragments, through CCS, can be covered multiple times without having to sequence from each end independently. Multiplexing with PacBio does not involve an independent read, but rather follows the standard “in-line” barcoding model.

[0309] In one embodiment, where the first unique marker is the ITS genomic region, automated ribosomal intergenic spacer analysis (ARISA) is used in one embodiment to determine the number and identity of microorganism strains in a sample (FIG. 1, 1003, FIG. 2, 2003) (Ranjard et al. (2003). Environmental Microbiology 5, pp. 1111-1120, incorporated by reference in its entirety for all puposes). The ITS region has significant heterogeneity in both length and nucleotide sequence. The use of a fluorescence-labeled forward primer and an automatic DNA sequencer permits high resolution of separation and high throughput. The inclusion of an internal standard in each sample provides accuracy in sizing general fragments.

[0310] In another embodiment, fragment length polymorphism (RFLP) of PCR-amplified rDNA fragments, otherwise known as amplified ribosomal DNA restriction analysis (ARDRA), is used to characterize unique first markers and the abundance of the same in samples (FIG. 1, 1003, FIG. 2, 2003) (Massol-Deya et al. (1995). Mol. Microb. Ecol. Manual. 3.3.2, pp. 1-18, incorporated by reference in its entirety for all puposes). rDNA fragments are generated by PCR using general primers, digested with restriction enzymes, electrophoresed in agarose or acrylamide gels, and stained with ethidium bromide or silver nitrate.

[0311] One fingerprinting technique used in detecting the presence and abundance of a unique first marker is single-stranded-conformation polymorphism (SSCP) (Lee et al. (1996). Appl Environ Microbiol 62, pp. 3112-3120; Scheinert et al. (1996). J. Microbiol. Methods 26, pp. 103-117; Schwieger and Tebbe (1998). Appl. Environ. Microbiol. 64, pp. 4870-4876, each of which is incorporated by reference herein in its entirety). In this technique, DNA fragments such as PCR products obtained with primers specific for the 16S rRNA gene, are denatured and directly electrophoresed on a non-denaturing gel. Separation is based on differences in size and in the folded conformation of single-stranded DNA, which influences the electrophoretic mobility. Reannealing of DNA strands during electrophoresis can be prevented by a number of strategies, including the use of one phosphorylated primer in the PCR followed by specific digestion of the phosphorylated strands with lambda exonuclease and the use of one biotinylated primer to perform magnetic separation of one single strand after denaturation. To assess the identity of the predominant populations in a given consortium, in one embodiment, bands are excised and sequenced, or SSCP-patterns can be hybridized with specific probes. Electrophoretic conditions, such as gel matrix, temperature, and addition of glycerol to the gel, can influence the separation.

[0312] In addition to sequencing based methods, other methods for quantifying expression (e.g., gene, protein expression) of a second marker are amenable for use with the methods provided herein for determining the level of expression of one or more second markers (FIG. 1, 1004; FIG. 2, 2004). For example, quantitative RT-PCR, microarray analysis, linear amplification techniques such as nucleic acid sequence based amplification (NASBA) are all amenable for use with the methods described herein, and can be carried out according to methods known to those of ordinary skill in the art.

[0313] In another embodiment, the sample, or a portion thereof is subjected to a quantitative polymerase chain reaction (PCR) for detecting the presence and abundance of a first marker and/or a second marker (FIG. 1, 1003-1004; FIG. 2, 2003-2004). Specific microorganism strains activity is measured by reverse transcription of transcribed ribosomal and/or messenger RNA (rRNA and mRNA) into complementary DNA (cDNA), followed by PCR (RT-PCR).

[0314] In another embodiment, the sample, or a portion thereof is subjected to PCR-based fingerprinting techniques to detect the presence and abundance of a first marker and/or a second marker (FIG. 1, 1003-1004; FIG. 2, 2003-2004). PCR products can be separated by electrophoresis based on the nucleotide composition. Sequence variation among the different DNA molecules influences the melting behaviour, and therefore molecules with different sequences will stop migrating at different positions in the gel. Thus electrophoretic profiles can be defined by the position and the relative intensity of different bands or peaks and can be translated to numerical data for calculation of diversity indices. Bands can also be excised from the gel and subsequently sequenced to reveal the phylogenetic affiliation of the community members. Electrophoresis methods include, but are not limited to: denaturing gradient gel electrophoresis (DGGE), temperature gradient gel electrophoresis (TGGE), single-stranded-conformation polymorphism (SSCP), restriction fragment length polymorphism analysis (RFLP) or amplified ribosomal DNA restriction analysis (ARDRA), terminal restriction fragment length polymorphism analysis (T-RFLP), automated ribosomal intergenic spacer analysis (ARISA), rando mLy amplified polymorphic DNA (RAPD), DNA amplification fingerprinting (DAF) and Bb-PEG electrophoresis.

[0315] In another embodiment, the sample, or a portion thereof is subjected to a chip-based platform such as microarray or microfluidics to determine the abundance of a unique first marker and/or presence/abundance of a unique second marker (FIG. 1, 1003-1004, FIG. 2, 2003-2004). The PCR products are amplified from total DNA in the sample and directly hybridized to known molecular probes affixed to microarrays. After the fluorescently labeled PCR amplicons are hybridized to the probes, positive signals are scored by the use of confocal laser scanning microscopy. The microarray technique allows samples to be rapidly evaluated with replication, which is a significant advantage in microbial community analyses. In general, the hybridization signal intensity on microarrays is directly proportional to the abundance of the target organism. The universal high-density 16S microarray (PhyloChip) contains about 30,000 probes of 16SrRNA gene targeted to several cultured microbial species and “candidate divisions”. These probes target all 121 demarcated prokaryotic orders and allow simultaneous detection of 8,741 bacterial and archaeal taxa. Another microarray in use for profiling microbial communities is the Functional Gene Array (FGA). Unlike PhyloChips, FGAs are designed primarily to detect specific metabolic groups of bacteria. Thus, FGA not only reveal the community structure, but they also shed light on the in situ community metabolic potential. FGA contain probes from genes with known biological functions, so they are useful in linking microbial community composition to ecosystem functions. An FGA termed GeoChip contains >24,000 probes from all known metabolic genes involved in various biogeochemical, ecological, and environmental processes such as ammonia oxidation, methane oxidation, and nitrogen fixation.

[0316] A protein expression assay, in one embodiment, is used with the methods described herein for determining the level of expression of one or more second markers (FIG. 1, 1004; FIG. 2, 2004). For example, in one embodiment, mass spectrometry or an immunoassay such as an enzyme-linked immunosorbant assay (ELISA) is utilized to quantify the level of expression of one or more unique second markers, wherein the one or more unique second markers is a protein.

[0317] In one embodiment, the sample, or a portion thereof is subjected to Bromodeoxyuridine (BrdU) incorporation to determine the level of a second unique marker (FIG. 1, 1004; FIG. 2, 2004). BrdU, a synthetic nucleoside analog of thymidine, can be incorporated into newly synthesized DNA of replicating cells. Antibodies specific for BRdU can then be used for detection of the base analog. Thus BrdU incorporation identifies cells that are actively replicating their DNA, a measure of activity of a microorganism according to one embodiment of the methods described herein. BrdU incorporation can be used in combination with FISH to provide the identity and activity of targeted cells.

[0318] In one embodiment, the sample, or a portion thereof is subjected to microautoradiography (MAR) combined with FISH to determine the level of a second unique marker (FIG. 1, 1004; FIG. 2, 2004). MAR-FISH is based on the incorporation of radioactive substrate into cells, detection of the active cells using autoradiography and identification of the cells using FISH. The detection and identification of active cells at single-cell resolution is performed with a microscope. MAR-FISH provides information on total cells, probe targeted cells and the percentage of cells that incorporate a given radiolabelled substance. The method provides an assessment of the in situ function of targeted microorganisms and is an effective approach to study the in vivo physiology of microorganisms. A technique developed for quantification of cell-specific substrate uptake in combination with MAR-FISH is known as quantitative MAR (QMAR).

[0319] In one embodiment, the sample, or a portion thereof is subjected to stable isotope Raman spectroscopy combined with FISH (Raman-FISH) to determine the level of a second unique marker (FIG. 1, 1004; FIG. 2, 2004). This technique combines stable isotope probing, Raman spectroscopy and FISH to link metabolic processes with particular organisms. The proportion of stable isotope incorporation by cells affects the light scatter, resulting in measurable peak shifts for labelled cellular components, including protein and mRNA components. Raman spectroscopy can be used to identify whether a cell synthesizes compounds including, but not limited to: oil (such as alkanes), lipids (such as triacylglycerols (TAG)), specific proteins (such as heme proteins, metalloproteins), cytochrome (such as P450, cytochrome c), chlorophyll, chromophores (such as pigments for light harvesting carotenoids and rhodopsins), organic polymers (such as polyhydroxyalkanoates (PHA), polyhydroxybutyrate (PHB)), hopanoids, steroids, starch, sulfide, sulfate and secondary metabolites (such as vitamin B12).

[0320] In one embodiment, the sample, or a portion thereof is subjected to DNA/RNA stable isotope probing (SIP) to determine the level of a second unique marker (FIG. 1, 1004; FIG. 2, 2004). SIP enables determination of the microbial diversity associated with specific metabolic pathways and has been generally applied to study microorganisms involved in the utilization of carbon and nitrogen compounds. The substrate of interest is labelled with stable isotopes (such as ¹³C or ¹⁵N) and added to the sample. Only microorganisms able to metabolize the substrate will incorporate it into their cells. Subsequently, ¹³C-DNA and ¹⁵N-DNA can be isolated by density gradient centrifugation and used for metagenomic analysis. RNA-based SIP can be a responsive biomarker for use in SIP studies, since RNA itself is a reflection of cellular activity.

[0321] In one embodiment, the sample, or a portion thereof is subjected to isotope array to determine the level of a second unique marker (FIG. 1, 1004; FIG. 2, 2004). Isotope arrays allow for functional and phylogenetic screening of active microbial communities in a high-throughput fashion. The technique uses a combination of SIP for monitoring the substrate uptake profiles and microarray technology for determining the taxonomic identities of active microbial communities. Samples are incubated with a ¹⁴C-labeled substrate, which during the course of growth becomes incorporated into microbial biomass. The ¹⁴C-labeled rRNA is separated from unlabeled rRNA and then labeled with fluorochromes. Fluorescent labeled rRNA is hybridized to a phylogenetic microarray followed by scanning for radioactive and fluorescent signals. The technique thus allows simultaneous study of microbial community composition and specific substrate consumption by metabolically active microorganisms of complex microbial communities.

[0322] In one embodiment, the sample, or a portion thereof is subjected to a metabolomics assay to determine the level of a second unique marker (FIG. 1, 1004; FIG. 2, 2004). Metabolomics studies the metabolome which represents the collection of all metabolites, the end products of cellular processes, in a biological cell, tissue, organ or organism. This methodology can be used to monitor the presence of microorganisms and/or microbial mediated processes since it allows associating specific metabolite profiles with different microorganisms. Profiles of intracellular and extracellular metabolites associated with microbial activity can be obtained using techniques such as gas chromatography-mass spectrometry (GC-MS). The complex mixture of a metabolomic sample can be separated by such techniques as gas chromatography, high performance liquid chromatography and capillary electrophoresis. Detection of metabolites can be by mass spectrometry, nuclear magnetic resonance (NMR) spectroscopy, ion-mobility spectrometry, electrochemical detection (coupled to HPLC) and radiolabel (when combined with thin-layer chromatography).

[0323] According to the embodiments described herein, the presence and respective number of one or more active microorganism strains in a sample are determined (FIG. 1, 1006; FIG. 2, 2006). For example, strain identity information obtained from assaying the number and presence of first markers is analyzed to determine how many occurrences of a unique first marker are present, thereby representing a unique microorganism strain (e.g., by counting the number of sequence reads in a sequencing assay). This value can be represented in one embodiment as a percentage of total sequence reads of the first maker to give a percentage of unique microorganism strains of a particular microorganism type. In a further embodiment, this percentage is multiplied by the number of microorganism types (obtained at step 1002 or 2002, see FIG. 1 and FIG. 2) to give the absolute abundance of the one or more microorganism strains in a sample and a given volume.

[0324] The one or more microorganism strains are considered active, as described above, if the level of second unique marker expression at a threshold level, higher than a threshold value, e.g., higher than at least about 5%, at least about 10%, at least about 20% or at least about 30% over a control level.

[0325] In another aspect of the invention, a method for determining the absolute abundance of one or more microorganism strains is determined in a plurality of samples (FIG. 2, see in particular, 2007). For a microorganism strain to be classified as active, it need only be active in one of the samples. The samples can be taken over multiple time points from the same source, or can be from different environmental sources (e.g., different animals).

[0326] The absolute abundance values over samples are used in one embodiment to relate the one or more active microorganism strains, with an environmental parameter (FIG. 2, 2008). In one embodiment, the environmental parameter is the presence of a second active microorganism strain. Relating the one or more active microorganism strains to the environmental parameter, in one embodiment, is carried out by determining the co-occurrence of the strain and parameter by correlation or by network analysis.

[0327] In one embodiment, determining the co-occurrence of one or more active microorganism strains with an environmental parameter comprises a network and/or cluster analysis method to measure connectivity of strains or a strain with an environmental parameter within a network, wherein the network is a collection of two or more samples that share a common or similar environmental parameter. In another embodiment, the network and/or cluster analysis method may be applied to determining the co-occurrence of two or more active microorganism strains in a sample (FIG. 2, 2008). In another embodiment, the network analysis comprises nonparametric approaches including mutual information to establish connectivity between variables. In another embodiment, the network analysis comprises linkage analysis, modularity analysis, robustness measures, betweenness measures, connectivity measures, transitivity measures, centrality measures or a combination thereof (FIG. 2, 2009). In another embodiment, the cluster analysis method comprises building a connectivity model, subspace model, distribution model, density model, or a centroid model and/or using community detection algorithms such as the Louvain, Bron-Kerbosch, Girvan-Newman, Clauset-Newman-Moore, Pons-Latapy, and Wakita-Tsurumi algorithms (FIG. 2, 2010).

[0328] In one embodiment, the cluster analysis method is a heuristic method based on modularity optimization. In a further embodiment, the cluster analysis method is the Louvain method. See, e.g., the method described by Blondel et al. (2008). Fast unfolding of communities in large networks. Journal of Statistical Mechanics: Theory and Experiment, Volume 2008, October 2008, incorporated by reference herein in its entirety for all purposes.

[0329] In another embodiment, the network analysis comprises predictive modeling of network through link mining and prediction, collective classification, link-based clustering, relational similarity, or a combination thereof. In another embodiment, the network analysis comprises differential equation based modeling of populations. In another embodiment, the network analysis comprises Lotka-Volterra modeling.

[0330] In one embodiment, relating the one or more active microorganism strains to an environmental parameter (e.g., determining the co-occurrence) in the sample comprises creating matrices populated with linkages denoting environmental parameter and microorganism strain associations.

[0331] In one embodiment, the multiple sample data obtained at step 2007 (e.g., over two or more samples which can be collected at two or more time points where each time point corresponds to an individual sample), is compiled. In a further embodiment, the number of cells of each of the one or more microorganism strains in each sample is stored in an association matrix (which can be in some embodiments, an abundance matrix). In one embodiment, the association matrix is used to identify associations between active microorganism strains in a specific time point sample using rule mining approaches weighted with association (e.g., abundance) data. Filters are applied in one embodiment to remove insignificant rules.

[0332] In one embodiment, the absolute abundance of one or more, or two or more active microorganism strains is related to one or more environmental parameters (FIG. 2, 2008), e.g., via co-occurrence determination. Environmental parameters are chosen by the user depending on the sample(s) to be analyzed and are not restricted by the methods described herein. The environmental parameter can be a parameter of the sample itself, e.g., pH, temperature, amount of protein in the sample. Alternatively, the environmental parameter is a parameter that affects a change in the identity of a microbial community (i.e., where the “identity” of a microbial community is characterized by the type of microorganism strains and/or number of particular microorganism strains in a community), or is affected by a change in the identity of a microbial community. For example, an environmental parameter in one embodiment, is the food intake of an animal or the amount of milk (or the protein or fat content of the milk) produced by a lactating ruminant In one embodiment, the environmental parameter is the presence, activity and/or abundance of a second microorganism strain in the microbial community, present in the same sample.

[0333] In some embodiments described herein, an environmental parameter is referred to as a metadata parameter.

[0334] Other examples of metadata parameters include but are not limited to genetic information from the host from which the sample was obtained (e.g., DNA mutation information), sample pH, sample temperature, expression of a particular protein or mRNA, nutrient conditions (e.g., level and/or identity of one or more nutrients) of the surrounding environment/ecosystem), susceptibility or resistance to disease, onset or progression of disease, susceptibility or resistance of the sample to toxins, efficacy of xenobiotic compounds (pharmaceutical drugs), biosynthesis of natural products, or a combination thereof.

[0335] For example, according to one embodiment, microorganism strain number changes are calculated over multiple samples according to the method of FIG. 2 (i.e., at 2001-2007). Strain number changes of one or more active strains over time is compiled (e.g., one or more strains that have initially been identified as active according to step 2006), and the directionality of change is noted (i.e., negative values denoting decreases, positive values denoting increases). The number of cells over time is represented as a network, with microorganism strains representing nodes and the abundance weighted rules representing edges. Markov chains and random walks are leveraged to determine connectivity between nodes and to define clusters. Clusters in one embodiment are filtered using metadata in order to identify clusters associated with desirable metadata (FIG. 2, 2008).

[0336] In a further embodiment, microorganism strains are ranked according to importance by integrating cell number changes over time and strains present in target clusters, with the highest changes in cell number ranking the highest.

[0337] Network and/or cluster analysis method in one embodiment, is used to measure connectivity of the one or more strains within a network, wherein the network is a collection of two or more samples that share a common or similar environmental parameter. In one embodiment, network analysis comprises linkage analysis, modularity analysis, robustness measures, betweenness measures, connectivity measures, transitivity measures, centrality measures or a combination thereof. In another embodiment, network analysis comprises predictive modeling of network through link mining and prediction, social network theory, collective classification, link-based clustering, relational similarity, or a combination thereof. In another embodiment, network analysis comprises differential equation based modeling of populations. In yet another embodiment, network analysis comprises Lotka-Volterra modeling.

[0338] Cluster analysis method comprises building a connectivity model, subspace model, distribution model, density model, or a centroid model.

[0339] Network and cluster based analysis, for example, to carry out method step 2008 of FIG. 2, can be carried out via a module. As used herein, a module can be, for example, any assembly, instructions and/or set of operatively-coupled electrical components, and can include, for example, a memory, a processor, electrical traces, optical connectors, software (executing in hardware) and/or the like.

### Bovine Pathogen Resistance and Clearance

[0340] In some aspects, the present disclosure is drawn to administering one or more microbial compositions described herein to cows to clear the gastrointestinal tract of pathogenic microbes. In some embodiments, the present disclosure is further drawn to administering microbial compositions described herein to prevent colonization of pathogenic microbes in the gastrointestinal tract. In some embodiments, the administration of microbial compositions described herein further clears pathogens from the integument and the respiratory tract of cows, and/or prevent colonization of pathogens on the integument and in the respiratory tract. In some embodiments, the administration of microbial compositions described herein reduce leaky gut/intestinal permeability, inflammation, and/or incidence of liver disease.

[0341] In some embodiments, the microbial compositions of the present disclosure comprise one or more microbes that are present in the gastrointestinal tract of cows at a relative abundance of less than 15%, 14%, 13%, 12%, 11%, 10%, 9%, 8%, 7%, 6%, 5%, 4%, 3%, 2%, 1%, 0.5%, 0.1%, or 0.01%.

[0342] In some embodiments, after administration of microbial compositions of the present disclosure the one or more microbes are present in the gastrointestinal tract of the cow at a relative abundance of at least 0.5%, 1%, 5%, 10%, 15%, 20%, 25%, 30%, 35%, 40%, 45%, 50%, 55%, 60%, 65%, 70%, 75%, 80%, 85%, 90%, or 95%.

[0343] Pathogenic microbes of cows may include the following: Clostridium perfringens, Clostridium botulinum, Salmonella typi, Salmonella typhimurium, Salmonella enterica, Salmonella pullorum, Erysipelothrix insidiosa, Campylobacter jejuni, Campylobacter coli, Campylobacter lari, Listeria monocytogenes, Streptococcus agalactiae, Streptococcus dysgalactiae, Corynebacterium bovis, Mycoplasma sp., Citrobacter sp., Enterobacter sp., Pseudomonas aeruginosa, Pasteurella sp., Bacillus cereus, Bacillus licheniformis, Streptococcus uberis, Staphylococcus aureus, and pathogenic strains of Escherichia coli and Staphylococcus aureus. In some embodiments, the pathogenic microbes include viral pathogens. In some embodiments, the pathogenic microbes are pathogenic to both cows and humans. In some embodiments, the pathogenic microbes are pathogenic to either cows or humans.

[0344] In some embodiments, the administration of compositions of the present disclosure to cows modulate the makeup of the gastrointestinal microbiome such that the administered microbes outcompete microbial pathogens present in the gastrointestinal tract. In some embodiments, the administration of compositions of the present disclosure to cows harboring microbial pathogens outcompetes the pathogens and clears cows of the pathogens. In some embodiments, the administration of compositions of the present disclosure results in the stimulation of host immunity, and aid in clearance of the microbial pathogens. In some embodiments, the administration of compositions of the present disclosure introduce microbes that produce bacteriostatic and/or bactericidal components that decrease or clear the cows of the microbial pathogens. (U.S. Pat. No. 8,345,010).

[0345] In some embodiments, challenging cows with a microbial colonizer or microbial pathogen after administering one or more compositions of the present disclosure prevents the microbial colonizer or microbial pathogen from growing to a relative abundance of greater than 15%, 4%1, 3%1, 12%, 11%, 10%, 9%, 8%, 7%, 6%, 5%, 4%, 3%, 2%, 1%, 0.5%, 0.1%, or 0.01%. In further embodiments, challenging cows with a microbial colonizer or microbial pathogen after administering one or more compositions of the present disclosure prevents the microbial colonizer or microbial pathogen from colonizing cows.

[0346] In some embodiments, clearance of the microbial colonizer or microbial pathogen occurs in less than 25 days, less than 24 days, less than 23 days, less than 22 days, less than 21 days, less than 20 days, less than 19 days, less than 18 days, less than 17 days, less than 16 days, less than 15 days, less than 14 days, less than 13 days, less than 12 days, less than 11 days, less than 10 days, less than 9 days, less than 8 days, less than 7 days, less than 6 days, less than 5 days, less than 4 days, less than 3 days, or less than 2 days post administration of the one or more compositions of the present disclosure.

[0347] In some embodiments, clearance of the microbial colonizer or microbial pathogen occurs within 1-30 days, 1-25 days, 1-20 day, 1-15 days, 1-10 days, 1-5 days, 5-30 days, 5-25 days, 5-20 days, 5-15 days, 5-10 days, 10-30 days, 10-25 days, 10-20 days, 10-15 days, 15-30 days, 15-25 days, 15-20 days, 20-30 days, 20-25 days, or 25-30 days post administration of the one or more compositions of the present disclosure.

### Improved Traits

[0348] In some aspects, the present disclosure is drawn to administering microbial compositions described herein to ruminants to improve one or more traits through the modulation of aspects of milk production, milk quantity, milk quality, ruminant digestive chemistry, and efficiency of feed utilization and digestibility.

[0349] In some embodiments, improving the quantity of milk fat produced by a ruminant is desirable, wherein milk fat includes triglycerides, triacylglycerides, diacylglycerides, monoacylglycerides, phospholipids, cholesterol, glycolipids, and free fatty acids. In further embodiments, free fatty acids include short chain fatty acids (i.e., C4:0, C6:0, and C8:0), medium chain fatty acids (i.e., C10:0, C10:1, C12:0, C14:0, C14:1, and C15:0), and long chain fatty acids (i.e., C16:0, C16:1, C17:0, C17:1, C18:0, C18:1, C18:2, C18:3, and C20:0). In further embodiments, it is desirable to achieve an increase in milk fat efficiency, which is measured by the total weight of milk fat produced, divided by the weight of feed ingested. The weight of milk fat produced is calculated from the measured fat percentage multiplied by the weight of milk produced.

[0350] In some embodiments, improving the quantity of carbohydrates in milk produced by a ruminant is desirable, wherein carbohydrates include lactose, glucose, galactose, and oligosaccharides. Tao et al. (2009. J. Dairy Sci. 92:2991-3001) disclose numerous oligosaccharides that may be found in bovine milk.

[0351] In some embodiments, improving the quantity of proteins in milk produced by a ruminant, wherein proteins include caseins and whey. In some embodiments, proteins of interest are only those proteins produced in milk. In other embodiments, proteins of interest are not required to be produced only in milk. Whey proteins include immunoglobulins, serum albumin, beta-lactoglobulin, and alpha-lactoglobulin.

[0352] In some embodiments, improving the quantity of vitamins in milk produced by a ruminant is desirable. Vitamins found in milk include the fat-soluble vitamins of A, D, E, and K; as well as the B vitamins found in the aqueous phase of the milk.

[0353] In some embodiments, improving the quantity of minerals in milk produced by a ruminant is desirable. Minerals found in milk include iron, zinc, copper, cobalt, magnesium, manganese, molybdenum, calcium, phosphorous, potassium, sodium, chlorine, and citric acid. Trace amounts of the following may be found in milk: aluminum, arsenic, boron, bromine, cadmium, chromium, fluorine, iodine, lead, nickel, selenium, silicon, silver, strontium, and vanadium.

[0354] In some embodiments, improving the milk yield and milk volume produced by a ruminant is desirable. In some embodiments, it is further desirable if the increase in milk yield and volume is not accompanied by simply an increase in solute volume.

[0355] In some embodiments improving energy-corrected milk (ECM) is desirable. In further embodiments, improving ECM amounts to increasing the calculated ECM output. In some embodiments, the ECM is calculated as follows: ECM=(0.327×milk pounds)+(12.95×fat pounds)+(7.2×protein pounds).

[0356] In some embodiments, improving the efficiency and digestibility of animal feed is desirable. In some embodiments, increasing the degradation of lignocellulosic components from animal feed is desirable. Lignocellulosic components include lignin, cellulose, and hemicellulose.

[0357] In some embodiments, increasing the concentration of fatty acids in the rumen of ruminants is desirable. Fatty acids include acetic acid, propionic acid, and butyric acid. In some embodiments, maintaining the pH balance in the rumen to prevent lysis of beneficial microbial consortia is desirable. In some embodiments, maintaining the pH balance in the rumen to prevent a reduction of beneficial microbial consortia is desirable.

[0358] In some embodiments, decreasing the amount of methane and manure produced by ruminants is desirable.

[0359] In some embodiments, improving the dry matter intake is desirable. In some embodiments, improving the efficiency of nitrogen utilization of the feed and dry matter ingested by ruminants is desirable.

[0360] In some embodiments, the improved traits of the present disclosure are the result of the administration of the presently described microbial compositions. It is thought that the microbial compositions modulate the microbiome of the ruminants such that the biochemistry of the rumen is changed in such a way that the ruminal liquid and solid substratum are more efficiently and more completely degraded into subcomponents and metabolites than the rumens of ruminants not having been administered microbial compositions of the present disclosure.

[0361] In some embodiments, the increase in efficiency and the increase of degradation of the ruminal substratum result in an increase in improved traits of the present disclosure.

### Mode of Action: Digestibility Improvement in Ruminants

[0362] The rumen is a specialized stomach dedicated to the digestion of feed components in ruminants. A diverse microbial population inhabits the rumen, where their primary function revolves around converting the fibrous and non-fibrous carbohydrate components into useable sources of energy and protein. Cellulose, in particular, forms up to 40% of plant biomass and is considered indigestible by mammals. It also is tightly associated with other structural carbohydrates, including hemicellulose, pectin, and lignin. The cellulolytic microbes in the rumen leverage extensive enzymatic activity in order break these molecules down into simple sugars and volatile fatty acids. This enzymatic activity is critical to the extraction of energy from feed, and more efficient degradation ultimately provides more energy to the animal. The soluble sugars found in the non-fibrous portion of the feed are also fermented into gases and volatile fatty acids such as butyrate, propionate, and acetate. Volatile fatty acids arising from the digestion of both the fibrous and non-fibrous components of feed are ultimately the main source of energy of the ruminant.

[0363] Individual fatty acids have been tested in ruminants in order to identify their impacts on varying aspects of production.

[0364] Acetate: Structural carbohydrates produce large amounts of acetate when degraded. An infusion of acetate directly into the rumen was shown to improve the yield of milk, as well as the amount of milk fat produced. Acetate represents at least 90% of acids in the peripheral blood—it is possible that acetate can be directly utilized by mammary tissue as a source of energy. See Rook and Balch. 1961. Brit. J. Nutr. 15:361-369.

[0365] Propionate: Propionate has been shown to increase milk protein production, but decrease milk yield. See Rook and Balch. 1961. Brit. J. Nutr. 15:361-369.

[0366] Butyrate: An infusion of butyrate directly into the rumen of dairy cows increases milk fat production without changing milk yield. See Huhtanen et al. 1993. J. Dairy Sci. 76:1114-1124.

### Network Analysis

[0367] A network and/or cluster analysis method, in one embodiment, is used to measure connectivity of the one or more strains within a network, wherein the network is a collection of two or more samples that share a common or similar environmental parameter. In one embodiment, network analysis comprises linkage analysis, modularity analysis, robustness measures, betweenness measures, connectivity measures, transitivity measures, centrality measures or a combination thereof. In another embodiment, network analysis comprises predictive modeling of network through link mining and prediction, social network theory, collective classification, link-based clustering, relational similarity, or a combination thereof. In another embodiment, network analysis comprises mutual information, maximal information coefficient (MIC) calculations, or other nonparametric methods between variables to establish connectivity. In another embodiment, network analysis comprises differential equation based modeling of populations. In yet another embodiment, network analysis comprises Lotka-Volterra modeling.

[0368] The environmental parameter can be a parameter of the sample itself, e.g., pH, temperature, amount of protein in the sample. Alternatively, the environmental parameter is a parameter that affects a change in the identity of a microbial community (i.e., where the “identity” of a microbial community is characterized by the type of microorganism strains and/or number of particular microorganism strains in a community), or is affected by a change in the identity of a microbial community. For example, an environmental parameter in one embodiment, is the food intake of an animal or the amount of milk (or the protein or fat content of the milk) produced by a lactating ruminant. In one embodiment, the environmental parameter is the presence, activity and/or abundance of a second microorganism strain in the microbial community, present in the same sample. In some embodiments, an environmental parameter is referred to as a metadata parameter.

[0369] Other examples of metadata parameters include but are not limited to genetic information from the host from which the sample was obtained (e.g., DNA mutation information), sample pH, sample temperature, expression of a particular protein or mRNA, nutrient conditions (e.g., level and/or identity of one or more nutrients) of the surrounding environment/ecosystem), susceptibility or resistance to disease, onset or progression of disease, susceptibility or resistance of the sample to toxins, efficacy of xenobiotic compounds (pharmaceutical drugs), biosynthesis of natural products, or a combination thereof.

### Bovine Somatotropin/Bovine Growth Hormone

[0370] Bovine somatotropin (bST), also known as bovine growth hormone, is an animal drug approved by FDA to increase milk production in dairy cows. This drug is based on the somatotropin naturally produced in cattle. Somatotropin is a protein hormone produced in the pituitary gland of animals, including humans, and is essential for normal growth, development, and health maintenance.

[0371] FDA approved a bST product in 1993 with the brand name “Posilac™” (sometribove zinc suspension). Posilac™ is approved for over-the-counter use in dairy cows starting at around 2 months after the cow has a calf until the end of the lactation period. During this time, cows are injected with Posilac™ subcutaneously (under the skin) every 14 days. A cow's typical lactation period is approximately 10 months long, starting right after she has a calf. Thus, treated dairy cows are typically given Posilac™ for about 8 months of the year.

[0372] Dairy cows treated with Posila™ exhibit a milk yield of approximately 9.9 pounds and energy corrected milk of approximately 8.72 pounds post-peak (greater than 90 days in milk) compared to control. In some embodiments, the present disclosure provides microbial compositions that perform the same or better than bovine growth hormone (e.g., Posila™) in dairy cows. In some embodiments, the composition comprises one or more microorganisms from Table 1, 3 and/or 14. In some embodiments, the composition comprises one or more microorganisms comprising a 16S nucleic acid sequence sharing at least 97% sequence identity to any one of SEQ ID NOs: 1-30, 2045-2103, 2108, and 2125-4945. In some embodiments, the composition comprises one or more microorganisms comprising an ITS nucleic acid sequence sharing at least 97% sequence identity to any one of SEQ ID NOs: 31-60 and 2104-2107.

### EXAMPLES

[0373] The following examples are set forth as being representative of the present disclosure. These examples are not to be construed as limiting the scope of the present disclosure as these and other equivalent embodiments will be apparent in view of the present disclosure, figures and accompanying claims.

### Example 1. Analysis of Rumen Microbes for Volatile Fatty Acid Production

[0374] This example assessed the ability of microbial strains or enrichments to produce volatile fatty acids. Gas chromatography with flame ionization detection (GC-FID) was used to measure the concentrations of acetate, butyrate, and propionate in spent media.

[0375] For pure isolates, a single colony from each of the desired strains on solid anaerobic media (e.g., microbes with the SEQ ID NOs: 2125-4945) was inoculated into the strain's preferred rich media. Enrichments were inoculated from fresh rumen samples into a desired media. Various media recipes were used to mimic the rumen environment under a variety of relevant physiological conditions. Cultures and medium blanks were incubated at their optimal conditions until significant growth was visible in the cultures. Absorbance reads were taken at 600 nm to determine the growth of each culture.

[0376] Pure culture strain IDs were confirmed with Illumina sequencing. Enrichments and their corresponding sample inocula were Illumina sequenced to determine the presence or absence of target strains. These sequencing datasets were integrated with cell count data to determine if the target strains grew in vitro.

[0377] An aliquot of each culture was sterile filtered through 0.22 μm poly ethersulfone membrane into a sterile acid washed 15 mL glass sample vial and analyzed by GC-FID. GC-FID reactions were performed at Expert Chemical Analysis with the following parameters: The column is HP FFAP 30m, 0.53 mm, 0.25 um phase. Oven: 30 C for one minute then 5 C per minute to 200 C, Injection: 1 uL. Injector: 225 C, Detector: 250 C. Concentrations of acetate, butyrate, and propionate were quantified for the cultures and media blanks (shown in Table 15).

TABLE 15
Concentrations of acetate, butyrate, and propionate production

| Ascus_ID | Acetic Acid | Propionic Acid | Butyric Acid |
|---|---|---|---|
| Ascusb_221C | + | − | + |
| Ascusb_221A | + | + | + |
| Ascusb_624A | + | + | + |
| Ascusb_9421B | + | + | + |
| Ascusb_5149A | + | + | + |
| Ascusb_344B | + | + | + |
| Ascusb_2535A | + | + | + |
| Ascusb_877A | + | + | + |
| Ascusb_325B | + | + | + |
| Ascusb_3758B | + | + | + |
| Ascusb_2378A | + | + | + |
| Ascusb_150A | + | + | + |
| Ascusb_1149A | + | + | + |
| Ascusb_3011A | + | + | + |
| Ascusb_198A | + | + | + |
| Ascusb_1661A | + | + | + |
| Ascusb_7297B | + | + | + |
| Ascusb_991A | + | + | + |
| Ascusb_275A | + | + | + |
| Ascusb_3264B | + | + | + |
| Ascusb_2272A | + | + | + |
| Ascusb_3013A | + | + | + |
| Ascusb_233A | + | + | + |
| Ascusb_5387A | + | + | + |
| Ascusb_211A | + | + | + |
| Ascusb_4058B | + | + | + |
| Ascusb_724A | + | + | + |
| Ascusb_2027A | + | + | + |
| Ascusb_2886B | + | + | + |
| Ascusb_2684A | + | + | + |
| Ascusb_12328A | + | + | + |
| Ascusb_10412A | + | + | + |
| Ascusb_7360B | + | + | + |
| Ascusb_168B | + | + | + |
| Ascusb_4736A | + | + | + |
| Ascusb_1985B | + | + | + |
| Ascusb_14185A | + | + | + |
| Ascusb_3092A | + | + | + |
| Ascusb_4173A | + | + | + |
| Ascusb_115A | + | + | + |
| Ascusb_6373A | + | + | + |
| Ascusb_17947B | + | + | + |
| Ascusb_2831A | + | + | + |
| Ascusb_1139B | + | + | + |
| Ascusb_10375A | + | + | + |
| Ascusb_15111A | + | + | + |
| Ascusb_10976A | + | + | + |
| Ascusb_8024B | + | + | + |
| Ascusb_120B | + | + | + |
| Ascusb_1187A | + | + | + |
| Ascusb_10663A | + | + | + |
| Ascusb_1989A | + | + | + |
| Ascusb_132B | + | + | + |
| Ascusb_3718B | + | + | + |
| Ascusb_1203A | + | + | + |
| Ascusb_112A | + | + | + |
| Ascusb_2434A | + | + | + |
| Ascusb_3663A | + | + | + |
| Ascusb_3879B | + | + | + |
| Ascusb_10845A | + | + | + |
| Ascusb_15117A | + | + | + |
| Ascusb_927A | + | + | + |
| Ascusb_2143A | + | + | + |
| Ascusb_9020A | + | + | + |
| Ascusb_3047A | + | + | + |
| Ascusb_1784A | + | + | + |
| Ascusb_239B | + | + | + |
| Ascusb_1726A | + | + | + |
| Ascusb_5956A | + | + | + |
| Ascusb_3859A | + | + | + |
| Ascusb_12803A | + | + | + |
| Ascusb_11494A | + | + | + |
| Ascusb_3805A | + | + | + |
| Ascusb_514A | + | + | + |
| Ascusb_1959A | + | + | + |
| Ascusb_3898A | + | + | + |
| Ascusb_375B | + | + | + |
| Ascusb_434A | + | + | + |
| Ascusb_1135A | + | + | + |
| Ascusb_1834A | + | + | + |
| Ascusb_2594B | + | + | + |
| Ascusb_4126A | + | + | + |
| Ascusb_310A | + | + | + |
| Ascusb_211B | + | + | + |
| Ascusb_3385A | + | + | + |
| Ascusb_20566B | + | + | + |
| Ascusb_888A | + | + | + |
| Ascusb_2987B | + | + | + |
| Ascusb_2835A | + | + | + |
| Ascusb_1731A | + | + | + |
| Ascusb_1889B | + | + | + |
| Ascusb_1829A | + | + | + |
| Ascusb_2744A | + | + | + |
| Ascusb_1366B | + | + | + |
| Ascusb_2205A | + | + | + |
| Ascusb_352A | + | + | + |
| Ascusb_1018A | + | + | + |
| Ascusb_2776A | + | + | + |
| Ascusb_2606B | + | + | + |
| Ascusb_1150B | + | + | + |
| Ascusb_287A | + | + | + |
| Ascusb_301B | + | + | + |
| Ascusb_4975A | + | + | + |
| Ascusb_4846A | + | + | + |
| Ascusb_1929A | + | + | + |
| Ascusb_2866A | + | + | + |
| Ascusb_489B | + | + | + |
| Ascusb_3250A | + | + | + |
| Ascusb_19138A | + | + | + |
| Ascusb_300B | + | + | + |
| Ascusb_2895B | + | + | + |
| Ascusb_3533A | + | + | + |
| Ascusb_8024C | + | + | + |
| Ascusb_2440A | + | + | + |
| Ascusb_6714A | + | + | + |
| Ascusb_1059A | + | + | + |
| Ascusb_3342A | + | + | + |
| Ascusb_1107A | + | + | + |
| Ascusb_3810A | + | + | + |
| Ascusb_2736A | + | + | + |
| Ascusb_8863A | + | + | + |
| Ascusb_1924A | + | + | + |
| Ascusb_1189A | + | + | + |
| Ascusb_2725A | + | + | + |
| Ascusb_197A | + | + | + |
| Ascusb_4663A | + | + | + |
| Ascusb_6110A | + | + | + |
| Ascusb_154A | + | + | + |
| Ascusb_13706A | + | + | + |
| Ascusb_631A | + | + | + |
| Ascusb_4119B | + | + | + |
| Ascusb_7475A | + | + | + |
| Ascusb_957A | + | + | + |
| Ascusb_1665A | + | + | + |
| Ascusb_761A | + | + | + |
| Ascusb_2047A | + | + | + |
| Ascusb_4463A | + | + | + |
| Ascusb_1119A | + | + | + |
| Ascusb_2137A | + | + | + |
| Ascusb_8619A | + | + | + |
| Ascusb_383B | + | + | + |
| Ascusb_341A | + | + | + |
| Ascusb_21056A | + | + | + |
| Ascusb_4947A | + | + | + |
| Ascusb_14287A | + | + | + |
| Ascusb_3313A | + | + | + |
| Ascusb_7687A | + | + | + |
| Ascusb_1068B | + | + | + |
| Ascusb_2103A | + | + | + |
| Ascusb_5315B | + | + | + |
| Ascusb_676A | + | + | + |
| Ascusb_9441A | + | + | + |
| Ascusb_2792B | + | + | + |
| Ascusb_251A | + | + | + |
| Ascusb_6655B | + | + | + |
| Ascusb_20912A | + | + | + |
| Ascusb_1536A | + | + | + |
| Ascusb_1244B | + | + | + |
| Ascusb_987A | + | + | + |
| Ascusb_2845A | + | + | + |
| Ascusb_7519A | + | + | + |
| Ascusb_2686A | + | + | + |
| Ascusb_2786A | + | + | + |
| Ascusb_2254A | + | + | + |
| Ascusb_688B | + | + | + |
| Ascusb_3276A | + | + | + |
| Ascusb_3689B | + | + | + |
| Ascusb_321A | + | + | + |
| Ascusb_16972A | + | + | + |
| Ascusb_11080A | + | + | + |
| Ascusb_1794B | + | + | + |
| Ascusb_51B | + | + | + |
| Ascusb_5859A | + | + | + |
| Ascusb_3978A | + | + | + |
| Ascusb_917A | + | + | + |
| Ascusb_4364A | + | + | + |
| Ascusb_1906A | + | + | + |
| Ascusb_4840A | + | + | + |
| Ascusb_351A | + | + | + |
| Ascusb_13271B | + | + | + |
| Ascusb_2612B | + | + | + |
| Ascusb_2541B | + | + | + |
| Ascusb_4150A | + | + | + |
| Ascusb_5667A | + | + | + |
| Ascusb_2173A | + | + | + |
| Ascusb_108A | + | + | + |
| Ascusb_1366A | + | + | + |
| Ascusb_7156A | + | + | + |
| Ascusb_453B | + | + | + |
| Ascusb_4270A | + | + | + |
| Ascusb_2704A | + | + | + |
| Ascusb_4177A | + | + | + |
| Ascusb_2710A | + | + | + |
| Ascusb_5711A | + | + | + |
| Ascusb_3606B | + | + | + |
| Ascusb_20052B | + | + | + |
| Ascusb_17652A | + | + | + |
| Ascusb_318A | + | + | + |
| Ascusb_2516A | + | + | + |
| Ascusb_7077A | + | + | + |
| Ascusb_5136B | + | + | + |
| Ascusb_156A | + | + | + |
| Ascusb_1101A | + | + | + |
| Ascusb_141A | + | + | + |
| Ascusb_12866A | + | + | + |
| Ascusb_1702A | + | + | + |
| Ascusb_1890A | + | + | + |
| Ascusb_13587A | + | + | + |
| Ascusb_20566A | + | + | + |
| Ascusb_223A | + | + | + |
| Ascusb_198B | + | + | + |
| Ascusb_1661B | + | + | + |
| Ascusb_300A | + | + | + |
| Ascusb_813B | + | + | + |
| Ascusb_3757A | + | + | + |
| Ascusb_4971B | + | + | + |
| Ascusb_1179B | + | + | + |
| Ascusb_7150A | + | + | + |
| Ascusb_3125A | + | + | + |
| Ascusb_894A | + | + | + |
| Ascusb_804B | + | + | + |
| Ascusb_668A | + | + | + |
| Ascusb_10267A | + | + | + |
| Ascusb_2188B | + | + | + |
| Ascusb_1785A | + | + | + |
| Ascusb_372A | + | + | + |
| Ascusb_1007A | + | + | + |
| Ascusb_1212A | + | + | + |
| Ascusb_1476A | + | + | + |
| Ascusb_5237A | + | + | + |
| Ascusb_3521A | + | + | + |
| Ascusb_3379A | + | + | + |
| Ascusb_466A | + | + | + |
| Ascusb_6159A | + | + | + |
| Ascusb_299A | + | + | + |
| Ascusb_346A | + | + | + |
| Ascusb_2179B | + | + | + |
| Ascusb_4208A | + | + | + |
| Ascusb_9477A | + | + | + |
| Ascusb_4760A | + | + | + |
| Ascusb_1532A | + | + | + |
| Ascusb_7836A | + | + | + |
| Ascusb_5587A | + | + | + |
| Ascusb_2341A | + | + | + |
| Ascusb_6424A | + | + | + |
| Ascusb_1079B | + | + | + |
| Ascusb_9544A | + | + | + |
| Ascusb_5179A | + | + | + |
| Ascusb_295B | + | + | + |
| Ascusb_4081A | + | + | + |
| Ascusb_820A | + | + | + |
| Ascusb_57A | + | + | + |
| Ascusb_17128A | + | + | + |
| Ascusb_1312A | + | + | + |
| Ascusb_4803A | + | + | + |
| Ascusb_18705A | + | + | + |
| Ascusb_1630A | + | + | 0 |
| Ascusb_83A | + | + | 0 |
| Ascusb_2633A | + | + | 0 |
| Ascusb_8244A | + | + | 0 |
| Ascusb_9898B | + | 0 | + |
| Ascusb_299B | + | 0 | + |
| Ascusb_346B | + | 0 | + |
| Ascusb_1271A | + | 0 | + |
| Ascusb_3758C | + | 0 | + |
| Ascusb_20B | + | 0 | + |
| Ascusb_1989B | + | 0 | + |
| Ascusb_132D | + | 0 | + |
| Ascusb_3718C | + | 0 | + |
| Ascusb_18A | + | 0 | + |
| Ascusb_2495A | + | 0 | + |
| Ascusb_211C | + | 0 | + |
| Ascusb_310C | + | 0 | + |
| Ascusb_1924B | + | 0 | + |
| Ascusb_8863B | | 0 | + |
| Ascusb_1189B | + | 0 | + |
| Ascusb_2725B | + | 0 | + |
| Ascusb_2446B | + | 0 | + |
| Ascusb_2900A | + | 0 | + |
| Ascusb_2067A | + | 0 | + |
| Ascusb_1731B | + | 0 | + |
| Ascusb_1785B | + | 0 | + |
| Ascusb_1906B | + | 0 | + |
| Ascusb_93A | + | 0 | + |
| Ascusb_619B | + | 0 | + |
| Ascusb_447A | + | 0 | + |
| Ascusb_1187B | + | 0 | + |
| Ascusb_19172C | + | 0 | + |
| Ascusb_3031B | + | 0 | + |
| Ascusb_8619B | + | 0 | + |
| Ascusb_4126B | + | 0 | + |
| Ascusb_363B | + | 0 | + |
| Ascusb_9477B | + | 0 | + |
| Ascusb_4760B | + | 0 | + |
| Ascusb_1942A | + | 0 | + |
| Ascusb_2865A | + | 0 | + |
| Ascusb_3077A | + | 0 | + |
| Ascusb_9020C | + | 0 | + |
| Ascusb_5387B | + | 0 | + |
| Ascusb_233B | + | 0 | + |
| Ascusb_1104A | + | 0 | + |
| Ascusb_301C | + | 0 | + |
| Ascusb_294A | + | 0 | + |
| Ascusb_1549B | + | 0 | + |
| Ascusb_328B | + | 0 | + |
| Ascusb_351C | + | 0 | + |
| Ascusb_2220A | + | 0 | + |
| Ascusb_16089A | + | 0 | + |
| Ascusb_489C | + | 0 | + |
| Ascusb_1224B | + | 0 | + |
| Ascusb_56B | + | 0 | + |
| Ascusb_12149B | + | 0 | + |
| Ascusb_701A | + | 0 | + |
| Ascusb_3805B | + | 0 | + |
| Ascusb_13271C | + | 0 | + |
| Ascusb_2017B | + | 0 | + |
| Ascusb_3981A | + | 0 | + |
| Ascusb_4041A | + | 0 | + |
| Ascusb_1179D | + | 0 | + |
| Ascusb_534C | + | 0 | + |
| Ascusb_16442B | + | 0 | + |
| Ascusb_1287A | + | 0 | + |
| Ascusb_1508B | + | 0 | + |
| Ascusb_17652C | + | 0 | + |
| Ascusb_1368B | + | 0 | + |
| Ascusb_12394B | + | 0 | + |
| Ascusb_1332B | + | 0 | + |
| Ascusb_9039B | + | 0 | + |
| Ascusb_2191D | + | 0 | + |
| Ascusb_1666A | + | 0 | + |
| Ascusb_3810B | + | 0 | + |
| Ascusb_4058C | + | 0 | + |
| Ascusb_544B | + | 0 | + |
| Ascusb_3334A | + | 0 | + |
| Ascusb_9646A | + | 0 | + |
| Ascusb_15140B | + | 0 | + |
| Ascusb_16891C | + | 0 | + |
| Ascusb_3089D | + | 0 | + |
| Ascusb_798A | + | 0 | + |
| Ascusb_994B | + | 0 | + |
| Ascusb_3554B | + | 0 | + |
| Ascusb_1040B | + | 0 | + |
| Ascusb_20164A | + | 0 | + |
| Ascusb_679A | + | 0 | + |
| Ascusb_150B | + | 0 | + |
| Ascusb_2378B | + | 0 | + |
| Ascusb_1882B | + | 0 | + |
| Ascusb_1675A | + | 0 | + |
| Ascusb_18852A | + | 0 | + |
| Ascusb_5045A | + | 0 | + |
| Ascusb_3680B | + | 0 | + |
| Ascusb_2536A | + | 0 | + |
| Ascusb_1715C | + | 0 | + |
| Ascusb_1340B | + | 0 | + |
| Ascusb_818A | + | 0 | + |
| Ascusb_1278B | + | 0 | + |
| Ascusb_18804B | + | 0 | + |
| Ascusb_1532C | + | 0 | + |
| Ascusb_1760B | + | 0 | + |
| Ascusb_626A | + | 0 | + |
| Ascusb_21571B | + | 0 | + |
| Ascusb_822A | + | 0 | + |
| Ascusb_1829B | + | 0 | + |
| Ascusb_2744B | + | 0 | + |
| Ascusb_1889C | + | 0 | + |
| Ascusb_300C | + | 0 | + |
| Ascusb_1101B | + | 0 | + |
| Ascusb_813C | + | 0 | + |
| Ascusb_9659A | + | 0 | + |
| Ascusb_2648B | + | 0 | + |
| Ascusb_4062B | + | 0 | + |
| Ascusb_1276B | + | 0 | + |
| Ascusb_726A | + | 0 | + |
| Ascusb_927B | + | 0 | + |
| Ascusb_355B | + | 0 | + |
| Ascusb_7910B | + | 0 | + |
| Ascusb_1230A | + | 0 | + |
| Ascusb_794A | + | 0 | + |
| Ascusb_4971C | + | 0 | + |
| Ascusb_218A | + | 0 | + |
| Ascusb_1630C | + | 0 | + |
| Ascusb_4081C | + | 0 | + |
| Ascusb_5201C | + | 0 | + |
| Ascusb_865A | + | 0 | + |
| Ascusb_251B | + | 0 | + |
| Ascusb_6130B | + | 0 | + |
| Ascusb_51C | + | 0 | + |
| Ascusb_17128C | + | 0 | + |
| Ascusb_57C | + | 0 | + |
| Ascusb_3349C | + | 0 | + |
| Ascusb_725C | + | 0 | + |
| Ascusb_7360C | + | 0 | + |
| Ascusb_15382B | + | 0 | + |
| Ascusb_386C | + | 0 | + |
| Ascusb_1419C | + | 0 | + |
| Ascusb_1867B | + | 0 | + |
| Ascusb_3294B | + | 0 | + |
| Ascusb_2831B | + | 0 | + |
| Ascusb_1716A | + | 0 | + |
| Ascusb_120C | + | 0 | + |
| Ascusb_1149B | + | 0 | + |
| Ascusb_2710B | + | 0 | + |
| Ascusb_5711B | + | 0 | + |
| Ascusb_548A | + | 0 | + |
| Ascusb_2917B | + | 0 | + |
| Ascusb_555B | + | 0 | + |
| Ascusb_2255C | + | 0 | + |
| Ascusb_4938B | + | 0 | + |
| Ascusb_5705A | + | 0 | + |
| Ascusb_186A | + | 0 | + |
| Ascusb_371A | + | 0 | + |
| Ascusb_2432C | + | 0 | + |
| Ascusb_338B | + | 0 | + |
| Ascusb_3092C | + | 0 | + |
| Ascusb_15051B | + | 0 | + |
| Ascusb_1985D | + | 0 | + |
| Ascusb_4173B | + | 0 | + |
| Ascusb_14185C | + | 0 | + |
| Ascusb_4975C | + | 0 | + |
| Ascusb_1195B | + | 0 | + |
| Ascusb_6078A | + | 0 | + |
| Ascusb_3175B | + | 0 | + |
| Ascusb_992B | + | 0 | + |
| Ascusb_12024B | + | 0 | + |
| Ascusb_5433B | + | 0 | + |
| Ascusb_238A | + | 0 | + |
| Ascusb_1657A | + | 0 | + |
| Ascusb_3123B | + | 0 | + |
| Ascusb_2743A | + | 0 | + |
| Ascusb_6203A | + | 0 | + |
| Ascusb_12676A | + | 0 | + |
| Ascusb_7893A | + | 0 | + |
| Ascusb_1155A | + | 0 | + |
| Ascusb_20688A | + | 0 | + |
| Ascusb_1720A | + | 0 | + |
| Ascusb_265A | + | 0 | + |
| Ascusb_2594C | + | 0 | + |
| Ascusb_5320A | + | 0 | + |
| Ascusb_1147B | + | 0 | + |
| Ascusb_4552B | + | 0 | + |
| Ascusb_2272C | + | 0 | + |
| Ascusb_9859B | + | 0 | + |
| Ascusb_4154A | + | 0 | + |
| Ascusb_3469A | + | 0 | + |
| Ascusb_688C | + | 0 | + |
| Ascusb_19458A | + | 0 | + |
| Ascusb_2680A | + | 0 | + |
| Ascusb_3590B | + | 0 | + |
| Ascusb_21D | + | 0 | + |
| Ascusb_17947D | + | 0 | + |
| Ascusb_987B | + | 0 | + |
| Ascusb_10845B | + | 0 | + |
| Ascusb_3680A | + | 0 | + |
| Ascusb_1626A | + | 0 | + |
| Ascusb_14905A | + | 0 | + |
| Ascusb_464A | + | 0 | + |
| Ascusb_197B | + | 0 | + |
| Ascusb_1665B | + | 0 | + |
| Ascusb_2516B | + | 0 | + |
| Ascusb_5764A | + | 0 | + |
| Ascusb_3082A | + | 0 | + |
| Ascusb_108B | + | 0 | + |
| Ascusb_2792C | + | 0 | + |
| Ascusb_3321A | + | 0 | + |
| Ascusb_1161B | + | 0 | + |
| Ascusb_738A | + | 0 | + |
| Ascusb_15659B | + | 0 | + |
| Ascusb_379B | + | 0 | + |
| Ascusb_3326B | + | 0 | + |
| Ascusb_740A | + | 0 | + |
| Ascusb_2413B | + | 0 | + |
| Ascusb_15001A | + | 0 | + |
| Ascusb_13183A | + | 0 | + |
| Ascusb_429A | + | 0 | + |
| Ascusb_19080B | + | 0 | + |
| Ascusb_888B | + | 0 | + |
| Ascusb_15117C | + | 0 | + |
| Ascusb_10375B | + | 0 | + |
| Ascusb_10976C | + | 0 | + |
| Ascusb_15111C | + | 0 | + |
| Ascusb_318C | + | 0 | + |
| Ascusb_18705B | + | 0 | + |
| Ascusb_1588B | + | 0 | + |
| Ascusb_9933B | + | 0 | + |
| Ascusb_4663B | + | 0 | + |
| Ascusb_338C | + | 0 | + |
| Ascusb_6110B | + | 0 | + |
| Ascusb_3141A | + | 0 | + |
| Ascusb_2027C | + | 0 | + |
| Ascusb_724C | + | 0 | + |
| Ascusb_2786C | + | 0 | + |
| Ascusb_514C | + | 0 | + |
| Ascusb_4119D | + | 0 | + |
| Ascusb_3973A | + | 0 | + |
| Ascusb_2442B | + | 0 | + |
| Ascusb_431B | + | 0 | + |
| Ascusb_847C | + | 0 | + |
| Ascusb_896B | + | 0 | + |
| Ascusb_3868B | + | 0 | + |
| Ascusb_917B | + | 0 | + |
| Ascusb_1379B | + | 0 | + |
| Ascusb_1305B | + | 0 | + |
| Ascusb_589B | + | 0 | + |
| Ascusb_9116A | + | 0 | + |
| Ascusb_799B | + | 0 | + |
| Ascusb_678B | + | 0 | + |
| Ascusb_560B | + | 0 | + |
| Ascusb_3969B | + | 0 | + |
| Ascusb_2148A | + | 0 | + |
| Ascusb_2590D | + | 0 | + |
| Ascusb_16442C | + | 0 | + |
| Ascusb_19281B | − | + | + |
| Ascusb_20167B | − | + | + |
| Ascusb_1125B | − | + | + |
| Ascusb_14943B | − | + | + |
| Ascusb_19296B | − | + | + |
| Ascusb_624C | − | + | + |
| Ascusb_579B | − | + | + |
| Ascusb_8024A | − | + | + |
| Ascusb_3879A | − | + | + |
| Ascusb_9365A | − | + | + |
| Ascusb_21B | − | + | + |
| Ascusb_19172A | − | + | + |
| Ascusb_2294A | − | + | + |
| Ascusb_4670A | − | + | + |
| Ascusb_2381A | − | + | + |
| Ascusb_7938A | − | + | + |
| Ascusb_1882A | − | + | + |
| Ascusb_2191B | − | + | + |
| Ascusb_620A | − | + | + |
| Ascusb_3160A | − | + | + |
| Ascusb_1776A | − | + | + |
| Ascusb_2924A | − | + | + |
| Ascusb_804A | − | + | + |
| Ascusb_2188A | − | + | + |
| Ascusb_1244A | − | + | + |
| Ascusb_799A | − | + | + |
| Ascusb_678A | − | + | + |
| Ascusb_560A | − | + | + |
| Ascusb_3689A | − | + | + |
| Ascusb_994A | − | + | + |
| Ascusb_5201A | − | + | + |
| Ascusb_3089B | − | + | + |
| Ascusb_2177A | − | + | + |
| Ascusb_5891A | − | + | + |
| Ascusb_8962A | − | + | + |
| Ascusb_3705A | − | + | + |
| Ascusb_2594A | − | + | + |
| Ascusb_18804A | − | + | + |
| Ascusb_344A | − | + | + |
| Ascusb_3349A | − | + | + |
| Ascusb_317A | − | + | + |
| Ascusb_2425A | − | + | + |
| Ascusb_2590B | − | + | + |
| Ascusb_2191A | − | + | + |
| Ascusb_3089A | − | + | + |
| Ascusb_9216A | − | + | + |
| Ascusb_3606A | − | + | + |
| Ascusb_1588A | − | + | + |
| Ascusb_239A | − | + | + |
| Ascusb_2485A | − | + | + |
| Ascusb_5231A | − | + | + |
| Ascusb_51A | − | + | + |
| Ascusb_5315A | − | + | + |
| Ascusb_295A | − | + | + |
| Ascusb_1760A | − | + | + |
| Ascusb_2890A | − | + | + |
| Ascusb_5168B | − | + | + |
| Ascusb_6642B | − | + | + |
| Ascusb_2987A | − | + | + |
| Ascusb_4119A | − | + | + |
| Ascusb_64A | − | + | + |
| Ascusb_4286A | − | + | + |
| Ascusb_9898A | − | + | + |
| Ascusb_430A | − | + | + |
| Ascusb_254A | − | + | + |
| Ascusb_9421A | − | + | + |
| Ascusb_1618A | − | + | + |
| Ascusb_20052A | − | + | + |
| Ascusb_386A | − | + | + |
| Ascusb_1419A | − | + | + |
| Ascusb_13271A | − | + | + |
| Ascusb_12149A | − | + | + |
| Ascusb_2606A | − | + | + |
| Ascusb_4791A | − | + | + |
| Ascusb_688A | − | + | + |
| Ascusb_19080A | − | + | + |
| Ascusb_126A | − | + | + |
| Ascusb_2792A | − | + | + |
| Ascusb_4492A | − | + | + |
| Ascusb_1961A | − | + | + |
| Ascusb_453A | − | + | + |
| Ascusb_1794A | − | + | + |
| Ascusb_489A | − | + | + |
| Ascusb_2590A | − | + | + |
| Ascusb_1340A | − | + | + |
| Ascusb_4420A | − | + | + |
| Ascusb_3590A | − | + | + |
| Ascusb_4971A | − | + | + |
| Ascusb_325A | − | + | + |
| Ascusb_3264A | − | + | + |
| Ascusb_6655A | − | + | + |
| Ascusb_725A | − | + | + |
| Ascusb_1715A | − | + | + |
| Ascusb_1889A | − | + | + |
| Ascusb_5156A | − | + | + |
| Ascusb_383A | − | + | + |
| Ascusb_5168A | − | + | + |
| Ascusb_6642A | − | + | + |
| Ascusb_4355A | − | + | + |
| Ascusb_1305A | − | + | + |
| Ascusb_589A | − | + | + |
| Ascusb_19362A | − | + | + |
| Ascusb_813A | − | + | + |
| Ascusb_1259A | − | + | + |
| Ascusb_6094A | − | + | + |
| Ascusb_1139A | − | + | + |
| Ascusb_1985A | − | + | + |
| Ascusb_6413A | − | + | + |
| Ascusb_7297A | − | + | + |
| Ascusb_3718A | − | + | + |
| Ascusb_132A | − | + | + |
| Ascusb_534A | − | + | + |
| Ascusb_1179A | − | + | + |
| Ascusb_16442A | − | + | + |
| Ascusb_9920A | − | + | + |
| Ascusb_831A | − | + | + |
| Ascusb_10378A | − | + | + |
| Ascusb_18453A | − | + | + |
| Ascusb_7360A | − | + | + |
| Ascusb_15382A | − | + | + |
| Ascusb_2895A | − | + | + |
| Ascusb_1147A | − | + | + |
| Ascusb_2965A | − | + | + |
| Ascusb_4492B | − | + | + |
| Ascusb_2612A | − | + | + |
| Ascusb_363A | − | + | + |
| Ascusb_168A | − | + | + |
| Ascusb_3123A | − | + | + |
| Ascusb_375A | − | + | + |
| Ascusb_3758A | − | + | + |
| Ascusb_5136A | − | + | + |
| Ascusb_2432A | − | + | + |
| Ascusb_120A | − | + | + |
| Ascusb_1150A | − | + | + |
| Ascusb_21A | − | + | + |
| Ascusb_17947A | − | + | + |
| Ascusb_1079A | − | + | + |
| Ascusb_3851A | − | + | + |
| Ascusb_1344A | − | + | + |
| Ascusb_2886A | − | + | + |
| Ascusb_379A | − | + | + |
| Ascusb_2179A | − | + | + |
| Ascusb_1068A | − | + | + |
| Ascusb_896A | − | + | + |
| Ascusb_301A | − | + | + |
| Ascusb_15140A | − | + | + |
| Ascusb_16891A | − | + | + |
| Ascusb_4162A | − | + | + |
| Ascusb_2541A | − | + | + |
| Ascusb_445A | − | + | + |
| Ascusb_2860A | − | + | + |
| Ascusb_4385A | − | + | + |
| Ascusb_4740A | − | + | + |
| Ascusb_649A | − | + | + |
| Ascusb_4058A | − | + | + |
| Ascusb_10267B | − | + | + |
| Ascusb_2188C | − | + | + |
| Ascusb_668B | − | + | + |
| Ascusb_804C | − | + | + |
| Ascusb_579A | − | + | + |
| Ascusb_2255A | − | + | + |
| Ascusb_19701A | + | + | + |
| Ascusb_14918A | − | + | 0 |
| Ascusb_45A | − | + | 0 |
| Ascusb_2598A | − | + | 0 |
| Ascusb_17962A | − | + | 0 |
| Ascusb_13295A | − | + | 0 |
| Ascusb_773A | + | + | + |
| Ascusb_15604A | + | + | + |
| Ascusb_17906A | + | + | + |
| Ascusb_2897A | + | + | + |
| Ascusb_115B | + | + | + |
| Ascusb_14159A | + | + | + |
| Ascusb_14763A | + | + | + |
| Ascusb_4900A | + | + | + |
| Ascusb_1575A | + | + | + |
| Ascusb_21055A | + | + | + |
| Ascusb_15152B | + | 0 | 0 |
| Ascusb_136B | + | 0 | 0 |
| Ascusb_223C | + | − | + |
| Ascusb_198C | + | − | + |
| Ascusb_2295A | − | − | 0 |
| Ascusb_2143B | − | − | 0 |
| Ascusb_124A | − | − | 0 |
| Ascusb_3851B | − | − | 0 |
| Ascusb_7126A | − | − | 0 |
| Ascusb_2255B | − | − | 0 |
| Ascusb_845A | − | − | 0 |
| Ascusb_223B | − | − | 0 |
| Ascusb_15705A | − | − | 0 |
| Ascusb_9859A | − | − | 0 |
| Ascusb_12147A | − | − | 0 |
| Ascusb_9658A | − | − | 0 |
| Ascusb_17947C | − | − | 0 |
| Ascusb_21C | − | − | 0 |
| Ascusb_1379A | − | − | 0 |
| Ascusb_11080B | − | − | 0 |
| Ascusb_1411A | − | − | 0 |
| Ascusb_3855A | − | − | 0 |
| Ascusb_4938A | − | − | 0 |
| Ascusb_4492C | − | − | 0 |
| Ascusb_2612C | − | − | 0 |
| Ascusb_445B | − | − | 0 |
| Ascusb_1590A | − | − | 0 |
| Ascusb_386B | − | − | 0 |
| Ascusb_1419B | − | − | 0 |
| Ascusb_221B | − | − | 0 |
| Ascusb_847B | − | − | 0 |
| Ascusb_466B | − | − | 0 |
| Ascusb_6214A | − | − | 0 |
| Ascusb_4975B | − | − | 0 |
| Ascusb_3349B | − | − | 0 |
| Ascusb_7502A | − | − | 0 |
| Ascusb_352B | − | − | 0 |
| Ascusb_262A | − | − | 0 |
| Ascusb_314A | − | − | 0 |
| Ascusb_4791B | − | − | 0 |
| Ascusb_479A | − | − | 0 |
| Ascusb_2965B | − | − | 0 |
| Ascusb_141B | − | − | 0 |
| Ascusb_110A | − | − | 0 |
| Ascusb_3013B | − | − | 0 |
| Ascusb_8516A | − | − | 0 |
| Ascusb_714A | − | − | 0 |
| Ascusb_1784B | − | − | 0 |
| Ascusb_3047B | − | − | 0 |
| Ascusb_2140A | − | − | 0 |
| Ascusb_2917A | − | − | 0 |
| Ascusb_555A | − | − | 0 |
| Ascusb_1618B | − | − | 0 |
| Ascusb_534B | − | − | 0 |
| Ascusb_1179C | − | − | 0 |
| Ascusb_1536B | − | − | 0 |
| Ascusb_132C | − | − | 0 |
| Ascusb_1278A | − | − | 0 |
| Ascusb_654A | − | − | 0 |
| Ascusb_2191C | − | − | 0 |
| Ascusb_4208B | − | − | 0 |
| Ascusb_3089C | − | − | 0 |
| Ascusb_338A | − | − | 0 |
| Ascusb_10663B | − | − | 0 |
| Ascusb_4840B | − | − | 0 |
| Ascusb_1834B | − | − | 0 |
| Ascusb_3969A | − | − | 0 |
| Ascusb_1115A | − | − | 0 |
| Ascusb_724B | − | − | 0 |
| Ascusb_2886C | − | − | 0 |
| Ascusb_2027B | − | − | 0 |
| Ascusb_514B | − | − | 0 |
| Ascusb_4119C | − | − | 0 |
| Ascusb_1549A | − | − | 0 |
| Ascusb_4552A | − | − | 0 |
| Ascusb_9020B | − | − | 0 |
| Ascusb_1867A | − | − | 0 |
| Ascusb_3294A | − | − | 0 |
| Ascusb_855A | − | − | 0 |
| Ascusb_1281A | − | − | 0 |
| Ascusb_1985C | − | − | 0 |
| Ascusb_14185B | − | − | 0 |
| Ascusb_3092B | − | − | 0 |
| Ascusb_15051A | − | − | 0 |
| Ascusb_35A | − | − | 0 |
| Ascusb_8042A | − | − | 0 |
| Ascusb_3554A | − | − | 0 |
| Ascusb_5201B | − | − | 0 |
| Ascusb_6229A | − | − | 0 |
| Ascusb_2648A | − | − | 0 |
| Ascusb_4062A | − | − | 0 |
| Ascusb_3539A | − | − | 0 |
| Ascusb_10976B | − | − | 0 |
| Ascusb_15111B | − | − | 0 |
| Ascusb_15117B | − | − | 0 |
| Ascusb_9316A | − | − | 0 |
| Ascusb_992A | − | − | 0 |
| Ascusb_12024A | − | − | 0 |
| Ascusb_3175A | − | − | 0 |
| Ascusb_5433A | − | − | 0 |
| Ascusb_17652B | − | − | 0 |
| Ascusb_511A | − | − | 0 |
| Ascusb_312A | − | − | 0 |
| Ascusb_19874A | − | − | 0 |
| Ascusb_6130A | − | − | 0 |
| Ascusb_3228A | − | − | 0 |
| Ascusb_116A | − | − | 0 |
| Ascusb_439A | − | − | 0 |
| Ascusb_10919A | − | − | 0 |
| Ascusb_2272B | − | − | 0 |
| Ascusb_19172B | − | − | 0 |
| Ascusb_3031A | − | − | 0 |
| Ascusb_351B | − | − | 0 |
| Ascusb_417A | − | − | 0 |
| Ascusb_2003A | − | − | 0 |
| Ascusb_1276A | − | − | 0 |
| Ascusb_56A | − | − | 0 |
| Ascusb_847A | − | − | 0 |
| Ascusb_625A | − | − | 0 |
| Ascusb_5587B | − | − | 0 |
| Ascusb_253A | − | − | 0 |
| Ascusb_355A | − | − | 0 |
| Ascusb_3326A | − | − | 0 |
| Ascusb_8129A | − | − | 0 |
| Ascusb_1040A | − | − | 0 |
| Ascusb_4420B | − | − | 0 |
| Ascusb_7814A | − | − | 0 |
| Ascusb_544A | − | − | 0 |
| Ascusb_3868A | − | − | 0 |
| Ascusb_2413A | − | − | 0 |
| Ascusb_9933A | − | − | 0 |
| Ascusb_17128B | − | − | 0 |
| Ascusb_57B | − | − | 0 |
| Ascusb_136A | − | − | 0 |
| Ascusb_6424B | − | − | 0 |
| Ascusb_375C | − | − | 0 |
| Ascusb_619A | − | − | 0 |
| Ascusb_143A | − | − | 0 |
| Ascusb_318B | − | − | 0 |
| Ascusb_2432B | − | − | 0 |
| Ascusb_2775A | − | − | 0 |
| Ascusb_7077B | − | − | 0 |
| Ascusb_2569A | − | − | 0 |
| Ascusb_1508A | − | − | 0 |
| Ascusb_2381B | − | − | 0 |
| Ascusb_16891B | − | − | 0 |
| Ascusb_2446A | − | − | 0 |
| Ascusb_75A | − | − | 0 |
| Ascusb_1195A | − | − | 0 |
| Ascusb_725B | − | − | 0 |
| Ascusb_1253A | − | − | 0 |
| Ascusb_112B | − | − | 0 |
| Ascusb_81A | − | − | 0 |
| Ascusb_4736B | − | − | 0 |
| Ascusb_1630B | − | − | 0 |
| Ascusb_2754A | − | − | 0 |
| Ascusb_9379A | − | − | 0 |
| Ascusb_2786B | − | − | 0 |
| Ascusb_7910A | − | − | 0 |
| Ascusb_328A | − | − | 0 |
| Ascusb_471A | − | − | 0 |
| Ascusb_3264C | − | − | 0 |
| Ascusb_20A | − | − | 0 |
| Ascusb_1715B | − | − | 0 |
| Ascusb_1291A | − | − | 0 |
| Ascusb_1161A | − | − | 0 |
| Ascusb_20052C | − | − | 0 |
| Ascusb_2341B | − | − | 0 |
| Ascusb_403A | − | − | 0 |
| Ascusb_170A | − | − | 0 |
| Ascusb_360A | − | − | 0 |
| Ascusb_2442A | − | − | 0 |
| Ascusb_15659A | − | − | 0 |
| Ascusb_21571A | − | − | 0 |
| Ascusb_1532B | − | − | 0 |
| Ascusb_1268A | − | − | 0 |
| Ascusb_1953A | − | − | 0 |
| Ascusb_2817A | − | − | 0 |
| Ascusb_1368A | − | − | 0 |
| Ascusb_1332A | − | − | 0 |
| Ascusb_12394A | − | − | 0 |
| Ascusb_2017A | − | − | 0 |
| Ascusb_9039A | − | − | 0 |
| Ascusb_4081B | − | − | 0 |
| Ascusb_9033A | − | − | 0 |
| Ascusb_7414A | − | − | 0 |
| Ascusb_957B | − | − | 0 |
| Ascusb_1961B | − | − | 0 |
| Ascusb_552A | − | − | 0 |
| Ascusb_11494B | − | − | 0 |
| Ascusb_12803B | − | − | 0 |
| Ascusb_5156B | − | − | 0 |
| Ascusb_5179B | − | − | 0 |
| Ascusb_13706B | − | − | 0 |
| Ascusb_431A | − | − | 0 |
| Ascusb_624B | − | − | 0 |
| Ascusb_4846B | − | − | 0 |
| Ascusb_2434B | − | − | 0 |
| Ascusb_3663B | − | − | 0 |
| Ascusb_6751A | − | − | 0 |
| Ascusb_16970A | − | − | 0 |
| Ascusb_5611A | − | − | 0 |
| Ascusb_1224A | − | − | 0 |
| Ascusb_1372A | − | − | 0 |
| Ascusb_64B | − | − | 0 |
| Ascusb_20150A | − | − | 0 |
| Ascusb_2590C | − | − | 0 |
| Ascusb_2670A | − | − | 0 |
| Ascusb_4366A | − | − | 0 |
| Ascusb_126B | − | − | 0 |
| Ascusb_310B | − | 0 | 0 |
| Ascusb_2633B | − | 0 | 0 |
| Ascusb_8244B | − | 0 | 0 |
| Ascusb_83B | − | 0 | 0 |
| Ascusb_15152A | − | − | 0 |
| Ascusb_19281A | − | 0 | 0 |
| Ascusb_20167A | − | 0 | 0 |
| Ascusb_1125A | − | 0 | 0 |
| Ascusb_14943A | − | 0 | 0 |
| Ascusb_19296A | − | 0 | 0 |
| Ascusb_17A | + | 0 | + |
| Ascusb_409A | + | − | + |
| Ascusb_17848A | + | + | + |

### Example 2. Analysis of Rumen Microbes for Carbon Source Utilization

[0378] This example will assess the ability of microbial isolates or enrichments to degrade various carbon sources. An optical density (OD600) will be used to measure growth of strains on multiple carbon sources over time.

### Soluble Carbon Source Assay

[0379] For pure isolates, a single colony from each of the desired strains (e.g., microbes with the SEQ ID NOs: 2125-4945) will be inoculated into the strain's preferred rich media. Enrichments will be inoculated from fresh rumen samples into a desired media. Various media recipes will be used to mimic the rumen environment under a variety of relevant physiological conditions. Strains will be inoculated into a carbon source assay anaerobically, wherein the assay will be set up in a 2 mL sterile 96-well plate, with each well containing RAMM salts, vitamins, minerals, cysteine, and a single carbon source. Carbon sources included glucose, xylan, lactate, xylose, mannose, glycerol, pectin, molasses, and cellobiose. Cells will be inoculated such that each well will start at an OD600 of 0.01. Optical densities will be read at 600 nm with the Synergy H4 hybrid plate reader. The strain IDs will be confirmed with Illumina sequencing after all wells are in stationary phase. Enrichments that exhibit growth will also be stained and cell counted to confirm that the individual strains within each enrichment grew.

### Insoluble Carbon Source Assay

[0380] For pure isolates, a single colony from each of the desired strains (e.g., microbes with the SEQ ID NOs: 2125-4945) will be inoculated into anaerobic Hungate tubes containing Lowe's semi defined media with cellulose paper, starch, or grass as the sole carbon source. (Lowe et al. 1985. J. Gen. Microbiol. 131:2225-2229). Enrichment cultures from rumen fluid will be set up using the same medium conditions. Cultures will be measured for degradation of insoluble carbon sources. Strain ID will be confirmed using Illumina sequencing. Enrichments that exhibit growth will also be stained and cell counted to confirm that the individual strains within each enrichment grew.

### Example 3. Microbial Supplementation in Dairy Cows

[0381] This example will assess the ability of microbial supplementation to increase milk production and/or improve milk compositional characteristics in dairy cows.

[0382] Cows in the experimental group will be orally administered one or more microbes selected from any one of SEQ ID NOs: 1-30, 2045-2103, 2108, and 2125-4945 at least once per day. Cows in the control group will either not receive treatment or will be administered a placebo during the study. Feed intake, milk yield, milk composition, and body condition scores and weights will be measured in control cows and cows receiving microbial supplementation throughout the study period.

[0383] Cows that receive microbial supplementation during the course of the study are expected to exhibit an increase in milk production (e.g., milk yield and energy corrected milk), as well as improved milk compositional charactersitics (e.g., percent fat, protein, and lactose) compared to control cows. Cows that receive microbial supplementation are also expected to perform the same or better than cows that receive bovine growth hormone (e.g., Posilac™).

### INCORPORATION BY REFERENCE

[0384] All references, articles, publications, patents, patent publications, and patent applications cited herein are incorporated by reference in their entireties for all purposes, including PCT Application Nos. PCT/US2017/012573, PCT/US2020/020311, and PCT/US2021/025264.

[0385] However, mention of any reference, article, publication, patent, patent publication, and patent application cited herein is not, and should not be taken as, an acknowledgment or any form of suggestion that they constitute valid prior art or form part of the common general knowledge in any country in the world.

### NUMBERED EMBODIMENTS

[0386] Other subject matter contemplated by the present disclosure is set out in the following numbered embodiments:

Embodiment 1. A composition, comprising:
[0387] a) one or more bacteria comprising a 16S nucleic acid sequence with at least about 97% sequence identity to any one of SEQ ID NOs: 2125-4945; and
[0388] b) a carrier suitable for ruminant administration.
   Embodiment 2. An orally deliverable composition for increasing milk production or improving milk compositional characteristics in a ruminant, comprising:
[0389] a) one or more bacteria comprising a 16S nucleic acid sequence with at least about 97% sequence identity to any one of SEQ ID NOs: 2125-4945; and
[0390] b) a carrier suitable for ruminant administration.
   Embodiment 3. A composition that performs the same or better than recombinant bovine growth hormone for increasing milk production or improving milk compositional characteristics in a ruminant, wherein the composition comprises:
[0391] a) one or more bacteria comprising a 16S nucleic acid sequence with at least about 97% sequence identity to any one of SEQ ID NOs: 2125-4945; and
[0392] b) a carrier suitable for ruminant administration.
   Embodiment 4. The composition of any one of embodiments 1-3, wherein the one or more bacteria comprises a 16S nucleic acid sequence with at least about 98% sequence identity to any one of SEQ ID NOs: 2125-4945.
   Embodiment 5. The composition of any one of embodiments 1-3, wherein the one or more bacteria comprises a 16S nucleic acid sequence with at least about 99% sequence identity to any one of SEQ ID NOs: 2125-4945.
   Embodiment 6. The composition of any one of embodiments 1-3, wherein the one or more bacteria comprises a 16S nucleic acid sequence selected from the group consisting of SEQ ID NOs: 2125-4945.
   Embodiment 7. The composition of any one of embodiments 1-6, wherein the composition comprises:
[0393] (a) one or more bacteria comprising a 16S nucleic acid sequence with at least about 97% sequence identity to any one of SEQ ID NOs: 1-30, 2045-2103, 2108, 4104, 4116, 4364, 4620, 4814, 4828, 4921, 4943, 4944, and 4945; and/or
[0394] (b) one or more fungi comprising an ITS nucleic acid sequence with at least about 97% sequence identity to any one of SEQ ID NOs: 31-60 and 2104-2107.
   Embodiment 8. The composition of any one of embodiments 1-6, wherein the composition comprises:
[0395] (a) one or more bacteria comprising a 16S nucleic acid sequence with at least about 98% sequence identity to any one of SEQ ID NOs: 1-30, 2045-2103, 2108, 4104, 4116, 4364, 4620, 4814, 4828, 4921, 4943, 4944, and 4945; and/or
[0396] (b) one or more fungi comprising an ITS nucleic acid sequence with at least about 98% sequence identity to any one of SEQ ID NOs: 31-60 and 2104-2107.
   Embodiment 9. The composition of any one of embodiments 1-6, wherein the composition comprises:
[0397] (a) one or more bacteria comprising a 16S nucleic acid sequence with at least about 99% sequence identity to any one of SEQ ID NOs: 1-30, 2045-2103, 2108, 4104, 4116, 4364, 4620, 4814, 4828, 4921, 4943, 4944, and 4945; and/or
[0398] (b) one or more fungi comprising an ITS nucleic acid sequence with at least about 99% sequence identity to any one of SEQ ID NOs: 31-60 and 2104-2107.
   Embodiment 10. The composition of any one of embodiments 1-6, wherein the composition comprises:
[0399] (a) one or more bacteria comprising a 16S nucleic acid sequence selected from the group consisting of SEQ ID NOs: 1-30, 2045-2103, 2108, 4104, 4116, 4364, 4620, 4814, 4828, 4921, 4943, 4944, and 4945; and/or
[0400] (b) one or more fungi comprising an ITS nucleic acid sequence selected from the group consisting of SEQ ID NOs: 31-60 and 2104-2107.
   Embodiment 11. The composition of any one of embodiments 1-10, wherein the ruminant is a cow.
   Embodiment 12. The composition of any one of embodiments 1-10, wherein the ruminant is a calf.
   Embodiment 13. The composition of any one of embodiments 1-10, wherein the ruminant administered the composition exhibits an increase in milk production that leads to an increase in milk yield or an increase in energy-corrected milk.
   Embodiment 14. The composition of any one of embodiments 1-10, wherein the ruminant administered the composition exhibits an improved milk compositional characteristic selected from the group consisting of: an increase in milk fat(s), an increase in milk protein(s), an increase of carbohydrates in milk, an increase of vitamins in milk, an increase of minerals in milk, or combinations thereof.
   Embodiment 15. The composition of any one of embodiments 1-10, wherein the ruminant administered the composition exhibits at least one improved phenotypic trait, selected from the group consisting of: an improved efficiency in feed utilization, improved digestibility, an increase in polysaccharide and lignin degradation, an increase in fatty acid concentration in the rumen, pH balance in the rumen, a reduction in methane emissions, a reduction in manure production, improved dry matter intake, an improved efficiency of nitrogen utilization, or combinations thereof.
   Embodiment 16. The composition of any one of embodiments 1-10, wherein the composition is formulated to protect the one or more bacteria and/or the one or more fungi from external stressors prior to entering the gastrointestinal tract of the ruminant.
   Embodiment 17. The composition of any one of embodiments 1-10, wherein the composition is formulated to protect the one or more bacteria and/or the one or more fungi from oxidative stress.
   Embodiment 18. The composition of any one of embodiments 1-10, wherein the composition is formulated to protect the one or more bacteria and/or the one or more fungi from moisture.
   Embodiment 19. The composition of any one of embodiments 1-10, wherein the composition is dry.
   Embodiment 20. The composition of any one of embodiments 1-10, wherein the composition is combined with food.
   Embodiment 21. The composition of any one of embodiments 1-10, wherein the composition is combined with cereal, starch, oilseed cake, or vegetable waste.
   Embodiment 22. The composition of any one of embodiments 1-10, wherein the composition is combined with hay, haylage, silage, livestock feed, forage, fodder, beans, grains, micro-ingredients, fermentation compositions, mixed ration, total mixed ration, or a mixture thereof.
   Embodiment 23. The composition of any one of embodiments 1-10, wherein the composition is formulated as a solid, liquid, or mixture thereof.
   Embodiment 24. The composition of any one of embodiments 1-10, wherein the composition is formulated as a pellet, capsule, granulate, or powder.
   Embodiment 25. The composition of any one of embodiments 1-10, wherein the composition is combined with water, medicine, vaccine, vitamin, mineral, amino acid, enzyme, or a mixture thereof.
   Embodiment 26. The composition of any one of embodiments 1-10, wherein the composition is encapsulated.
   Embodiment 27. The composition of embodiment 26, wherein the composition is encapsulated in a polymer or carbohydrate.
   Embodiment 28. The composition of any one of embodiments 1-10, wherein the one or more bacteria and/or one or more fungi are present in the composition in an amount of at least 10² cells.
   Embodiment 29. A method for increasing milk production or improving milk compositional characteristics in a ruminant, the method comprising orally administering to a ruminant an effective amount of the composition of any one of embodiments 1-10.
   Embodiment 30. The method according to embodiment 29, wherein the ruminant administered the effective amount of the composition exhibits an increase in milk production that leads to a measured increase in milk yield.
   Embodiment 31. The method according to embodiment 29, wherein the ruminant administered the effective amount of the composition exhibits an increase in milk production and improved milk compositional characteristics that leads to a measured increase in energy-corrected milk.
   Embodiment 32. The method according to embodiment 29, wherein the ruminant administered the effective amount of the composition exhibits an improved milk compositional characteristic selected from the group consisting of: an increase in milk fat(s), an increase in milk protein(s), an increase of carbohydrates in milk, an increase of vitamins in milk, an increase of minerals in milk, or combinations thereof.
   Embodiment 33. The method according to embodiment 29, wherein the ruminant administered the effective amount of the composition exhibits at least a 1% increase in the average production of: milk fat(s), milk protein(s), energy-corrected milk, or combinations thereof.
   Embodiment 34. The method according to embodiment 29, wherein the ruminant administered the effective amount of the composition exhibits at least a 10% increase in the average production of: milk fat(s), milk protein(s), energy-corrected milk, or combinations thereof.
   Embodiment 35. The method according to embodiment 29, wherein the ruminant administered the effective amount of the composition exhibits at least a 20% increase in the average production of: milk fat(s), milk protein(s), energy-corrected milk, or combinations thereof.
   Embodiment 36. The method according to embodiment 29, wherein the ruminant administered the effective amount of the composition, further exhibits at least one improved phenotypic trait, selected from the group consisting of: an improved efficiency in feed utilization, improved digestibility, an increase in polysaccharide and lignin degradation, an increase in fatty acid concentration in the rumen, pH balance in the rumen, a reduction in methane emissions, a reduction in manure production, improved dry matter intake, an improved efficiency of nitrogen utilization, or combinations thereof.
   Embodiment 37. The method according to embodiment 29, wherein the ruminant administered the effective amount of the composition, further exhibits a shift in the microbiome of the rumen.
   Embodiment 38. The method according to embodiment 29, wherein the ruminant administered the effective amount of the composition, further exhibits a shift in the microbiome of the rumen, wherein a population of microbes present in the rumen before administration of the composition increase in abundance after administration of the composition.
   Embodiment 39. The method according to embodiment 29, wherein the ruminant administered the effective amount of the composition, further exhibits: a shift in the microbiome of the rumen, wherein a population of microbes present in the rumen before administration of the composition decrease in abundance after administration of the composition.
   Embodiment 40. The method according to embodiment 29, wherein the ruminant administered the effective amount of the composition, further exhibits: a shift in the microbiome of the rumen,
[0401] wherein a first population of microbes present in the rumen before administration of the composition increase in abundance after administration of the composition, and
[0402] wherein a second population of microbes present in the rumen before administration of the composition decrease in abundance after administration of the composition.

What is claimed is:

1. An orally deliverable composition for increasing milk production or improving milk compositional characteristics in a ruminant, comprising:
a) one or more bacteria comprising a 16S nucleic acid sequence with at least about 97% sequence identity to any one of SEQ ID NOs: 2125-4945; and
b) a carrier suitable for ruminant administration.

2. The composition of claim 1, wherein the one or more bacteria comprises a 16S nucleic acid sequence selected from the group consisting of SEQ ID NOs: 2125-4945.

3. The composition of claim 1, wherein the composition comprises:
(a) one or more bacteria comprising a 16S nucleic acid sequence with at least about 97% sequence identity to any one of SEQ ID NOs: 1-30, 2045-2103, 2108, 4104, 4116, 4364, 4620, 4814, 4828, 4921, 4943, 4944, and 4945; and/or
(b) one or more fungi comprising an ITS nucleic acid sequence with at least about 97% sequence identity to any one of SEQ ID NOs: 31-60 and 2104-2107.

4. The composition of claim 1, wherein the composition comprises:
(a) one or more bacteria comprising a 16S nucleic acid sequence selected from the group consisting of SEQ ID NOs: 1-30, 2045-2103, 2108, 4104, 4116, 4364, 4620, 4814, 4828, 4921, 4943, 4944, and 4945; and/or
(b) one or more fungi comprising an ITS nucleic acid sequence selected from the group consisting of SEQ ID NOs: 31-60 and 2104-2107.

5. The composition of claim 1, wherein the ruminant is a cow.

6. The composition of claim 1, wherein the ruminant is a calf.

7. The composition of claim 1, wherein the ruminant administered the composition exhibits an increase in milk production that leads to an increase in milk yield or an increase in energy-corrected milk.

8. The composition of claim 1, wherein the ruminant administered the composition exhibits an improved milk compositional characteristic selected from the group consisting of: an increase in milk fat(s), an increase in milk protein(s), an increase of carbohydrates in milk, an increase of vitamins in milk, an increase of minerals in milk, or combinations thereof.

9. The composition of claim 1, wherein the ruminant administered the composition exhibits at least one improved phenotypic trait, selected from the group consisting of: an improved efficiency in feed utilization, improved digestibility, an increase in polysaccharide and lignin degradation, an increase in fatty acid concentration in the rumen, pH balance in the rumen, a reduction in methane emissions, a reduction in manure production, improved dry matter intake, an improved efficiency of nitrogen utilization, or combinations thereof.

10. The composition of claim 1, wherein the composition is formulated to protect the one or more bacteria from external stressors prior to entering the gastrointestinal tract of the ruminant.

11. The composition of claim 1, wherein the composition is formulated to protect the one or more bacteria from oxidative stress.

12. The composition of claim 1, wherein the composition is formulated to protect the one or more bacteria from moisture.

13. The composition of claim 1, wherein the composition is dry.

14. The composition of claim 1, wherein the composition is combined with food.

15. The composition of claim 1, wherein the composition is combined with cereal, starch, oilseed cake, or vegetable waste.

16. The composition of claim 1, wherein the composition is combined with hay, haylage, silage, livestock feed, forage, fodder, beans, grains, micro-ingredients, fermentation compositions, mixed ration, total mixed ration, or a mixture thereof.

17. The composition of claim 1, wherein the composition is formulated as a solid, liquid, or mixture thereof.

18. The composition of claim 1, wherein the composition is formulated as a pellet, capsule, granulate, or powder.

19. The composition of claim 1, wherein the composition is combined with water, medicine, vaccine, vitamin, mineral, amino acid, enzyme, or a mixture thereof.

20. The composition of claim 1, wherein the composition is encapsulated.

21. The composition of claim 20, wherein the composition is encapsulated in a polymer or carbohydrate.

22. The composition of claim 1, wherein the one or more bacteria are present in the composition in an amount of at least 10² cells.

23. A method for increasing milk production or improving milk compositional characteristics in a ruminant, the method comprising orally administering to a ruminant an effective amount of the composition of claim 1.

24. The method according to claim 23, wherein the ruminant administered the effective amount of the composition exhibits an increase in milk production that leads to a measured increase in milk yield.

25. The method according to claim 23, wherein the ruminant administered the effective amount of the composition exhibits an increase in milk production and improved milk compositional characteristics that leads to a measured increase in energy-corrected milk.

26. The method according to claim 23, wherein the ruminant administered the effective amount of the composition exhibits an improved milk compositional characteristic selected from the group consisting of: an increase in milk fat(s), an increase in milk protein(s), an increase of carbohydrates in milk, an increase of vitamins in milk, an increase of minerals in milk, or combinations thereof.

27. The method according to claim 23, wherein the ruminant administered the effective amount of the composition exhibits at least a 1% increase in the average production of: milk fat(s), milk protein(s), energy-corrected milk, or combinations thereof.

28. The method according to claim 23, wherein the ruminant administered the effective amount of the composition exhibits at least a 10% increase in the average production of milk fat(s), milk protein(s), energy-corrected milk, or combinations thereof.

29. The method according to claim 23, wherein the ruminant administered the effective amount of the composition exhibits at least a 20% increase in the average production of milk fat(s), milk protein(s), energy-corrected milk, or combinations thereof.

30. The method according to claim 23, wherein the ruminant administered the effective amount of the composition, further exhibits at least one improved phenotypic trait, selected from the group consisting of an improved efficiency in feed utilization, improved digestibility, an increase in polysaccharide and lignin degradation, an increase in fatty acid concentration in the rumen, pH balance in the rumen, a reduction in methane emissions, a reduction in manure production, improved dry matter intake, an improved efficiency of nitrogen utilization, or combinations thereof.

31. The method according to claim 23, wherein the ruminant administered the effective amount of the composition, further exhibits a shift in the microbiome of the rumen.

32. The method according to claim 23, wherein the ruminant administered the effective amount of the composition, further exhibits a shift in the microbiome of the rumen, wherein a population of microbes present in the rumen before administration of the composition increase in abundance after administration of the composition.

33. The method according to claim 23, wherein the ruminant administered the effective amount of the composition, further exhibits: a shift in the microbiome of the rumen, wherein a population of microbes present in the rumen before administration of the composition decrease in abundance after administration of the composition.

34. The method according to claim 23, wherein the ruminant administered the effective amount of the composition, further exhibits: a shift in the microbiome of the rumen, wherein a first population of microbes present in the rumen before administration of the composition increase in abundance after administration of the composition, and wherein a second population of microbes present in the rumen before administration of the composition decrease in abundance after administration of the composition.

35. A composition that performs the same or better than recombinant bovine growth hormone for increasing milk production or improving milk compositional characteristics in a ruminant, wherein the composition comprises:
a) one or more bacteria comprising a 16S nucleic acid sequence with at least about 97% sequence identity to any one of SEQ ID NOs: 2125-4945; and
b) a carrier suitable for ruminant administration.

36. The composition of claim 35, wherein the one or more bacteria comprises a 16S nucleic acid sequence selected from the group consisting of SEQ ID NOs: 2125-4945.

37. The composition of claim 35, wherein the composition comprises:
(a) one or more bacteria comprising a 16S nucleic acid sequence with at least about 97% sequence identity to any one of SEQ ID NOs: 1-30, 2045-2103, 2108, 4104, 4116, 4364, 4620, 4814, 4828, 4921, 4943, 4944, and 4945; and/or
(b) one or more fungi comprising an ITS nucleic acid sequence with at least about 97% sequence identity to any one of SEQ ID NOs: 31-60 and 2104-2107.

38. The composition of claim 35, wherein the composition comprises:
(a) one or more bacteria comprising a 16S nucleic acid sequence selected from the group consisting of SEQ ID NOs: 1-30, 2045-2103, 2108, 4104, 4116, 4364, 4620, 4814, 4828, 4921, 4943, 4944, and 4945; and/or
(b) one or more fungi comprising an ITS nucleic acid sequence selected from the group consisting of SEQ ID NOs: 31-60 and 2104-2107.

The application's sequence listing, which the Patent Office published only in electronic form, follows.

SEQUENCE LISTING (4945 sequences)

SEQ ID NO: 1 - DNA, 225 bp, Unknown
  Encodes 16S rRNA from Ruminococcus bovis sp. nov.
agagtttgatcctggctcaggatgaacgctggcggcgtgcctaacacatgcaagtcgaacggaacttctttgacagaattcttcggaaggaagttgattaagtttagtggcggacgggtgagtaacgcgtgagtaacctgcctttgagaggggaataacttcccgaaagggatgctaataccgcataaagcatagaagtcgcatggcttttatgccaaagattta

SEQ ID NO: 2 - DNA, 225 bp, Unknown
  Encodes 16S rRNA from Ruminococcus
agagtttgatcatggctcaggacgaacgctggcggcgtgcctaacacatgcaagtcgaacggaactattttgactgattccttcgggatgaagaatttttagtttagtggcggacgggtgagtaacgcgtgagtaacctgcctctgagaggggaataacgttctgaaaagaacgctaataccgcataacacatatttgccgcatgacagatatgtcaaagatttt

SEQ ID NO: 3 - DNA, 225 bp, Unknown
  Encodes 16S rRNA from Clostridium
agagtttgatcatggctcaggatgaacgctggcggcgtgcctaacacatgcaagtcgaacgaagctcgatcctcggagatttcggtcaaagaggaaagatgacttagtggcggacgggtgagtaatgcgtgagcaacctgccttggagtgggggacaacagttggaaacgactgctaataccgcataatgtatttggggggcatcctctgaataccaaagattta

SEQ ID NO: 4 - DNA, 225 bp, Unknown
  Encodes 16S rRNA from Roseburia
agagtttgatcctggctcaggatgaacgctggcggcgtgcttaacacatgcaagtcgaacgaggttcctatttacgatcccttcggggtgacgagtttgaaccgagtggcggacgggtgagtaacgcgtggggaacctgcctcatgccgggggataccagagggaaacttctgttaataccgcataagcgcacggtgtggcatcacacagtgtgaaaaactccgg

SEQ ID NO: 5 - DNA, 225 bp, Unknown
  Encodes 16S rRNA from Hydrogenoanaerobacterium
agagtttgatcatggctcaggacgaacgctggcggcgtgcctaacacatgcaagtcgaacgaagcatttggagctgatctcttcggagtgacgcaccttatgacttagtggcggacgggtgagtaacacgtgagcaacctgcctttcagagtggaataacagttggaaacggctgctaataccgcataacgtcatagtaccgcatgataccttgaccaaagattt

SEQ ID NO: 6 - DNA, 225 bp, Unknown
  Encodes 16S rRNA from Clostridium
agagtttgatcatggctcaggatgaacgctggcggcgtgcctaacacatgcaagttgaacgaagcaatcaagacagaatccttcgggaggaagatttgattgactgagtggcggacgggtgagtaacgcgtgggtaacctgccttgtacagggggataacagttagaaatgactgctaataccgcataagcgcacagtactgcatggtacagtgtgaaaaactcc

SEQ ID NO: 7 - DNA, 225 bp, Unknown
  Encodes 16S rRNA from Saccharofermentans
agagtttgatcatggctcaggatgaacgctggcggcgtgcctaacacatgcaagtcgaacggagttacgagagcttgcttttgtaacttagtggcggacgggtgagtaatgtatgagcaacctgcctttcagagggggacaacagttggaaacgactgctaataccgcataatgtatttgggtggcatcacctggataccaaaggagcaatccgctgaaagatgg

SEQ ID NO: 8 - DNA, 225 bp, Unknown
  Encodes 16S rRNA from Saccharofermentans
agagtttgatcatggctcaggatgaacgctggcggcgtgcttaacacatgcaagtcgaacggggtttaagaaggaagcttgctttcattttaaacctagtggcggacgggtgagtaacgcgtgaggaacctgcccttcagtggggaacaacaactagaaatggttgctaataccgcataatgtcggagagccgcatgacattccgaccaaaggatttattcgctg

SEQ ID NO: 9 - DNA, 225 bp, Unknown
  Encodes 16S rRNA from Butyricicoccus
agagtttgatcatggctcaggacgaacgctggcggcatgcctaacacatgcaagtcgaacggagatattgagagcttgcttttgatatcttagtggcggacgggtgagtaacgcgtgagcaacctgcctttcagtggggaataatacttcgaaagaggtactaataccgcataacgtattgagatcgcatggttttgataccaaagatttatcgctgagagatgg

SEQ ID NO: 10 - DNA, 225 bp, Unknown
  Encodes 16S rRNA from Papillibacter
agagtttgatcatggctcaggatgaacgctggcggcgtgcctaacacatgcaagtcgaacgaagcactttggatggagattcgtcaaaatctgatttgacttagtggcggacgggtgagtaatgtgtgagcaacctgcctttcagagggggacaacagttggaaacggctgctaataccgcataatgtatattgagggcatcctcgatataccaaaggagcaatc

SEQ ID NO: 11 - DNA, 225 bp, Unknown
  Encodes 16S rRNA from Ruminococcus
agagtttgatcatggctcaggacgaacgctggcggcgtgcctaacacatgcaagtcgaacggagttgaggagcttgctccttaacttagtggcggacgggtgagtaacgcgtgagtaacctgcctctgagaggggaataacgttctgaaaagaacgctaataccgcatgacacatatttgccgcatgacagatatgtcaaagattttatcgctcagagatggact

SEQ ID NO: 12 - DNA, 225 bp, Unknown
  Encodes 16S rRNA from Hydrogenoanaerobacterium
agagtttgatcatggctcaggacgaacgctggcggcacgcttaacacatgcaagtcgaacggagtttagagagcttgctttttaaacttagtggcggacgggtgagtaacacgtgagcaacctgccttcaagcgaggaataatgagtggaaacgctctgtaatacctcataacgtatttttaccgcatgataggaataccaaagatttatcacttgaagatgggc

SEQ ID NO: 13 - DNA, 225 bp, Unknown
  Encodes 16S rRNA from Pelotomaculum
agagtttgatcatggctcaggacgaacgctggcggcgtgcctaacacatgcaagtcgaacggagtaagaatttcggtttttacttagtggcgaacgggtgagtaacgcgtgaacaacctgccttcctgagggggataacacctggaaacaagtgctaataccgcataagaccacatgtccgcatggacgaggggtcaaaggagcaatccgcagggagaggggttc

SEQ ID NO: 14 - DNA, 225 bp, Unknown
  Encodes 16S rRNA from Saccharofermentans
agagtttgatcatggctcaggatgaacgctggcggcgtgcctaacacatgcaagtcgagcggagttatgagaggtgcttgcaccacttttaacttagcggcggacgggtgagtaacacgtgagtaacctgcccttgagtggggaacaacatcgagaaatcggtgctaataccgcataatatctctttgccgcatgacagagagatcaaaggatttattcgcttga

SEQ ID NO: 15 - DNA, 225 bp, Unknown
  Encodes 16S rRNA from Lachnospiraceae incertae sedis
agagtttgatcatggctcaggatgaacgctggcggcgtgcttaacacatgcaagtcgaacggagttatcaatgaaacctagtgatttgataacttagtggcggacgggtgagtaacgcgtgggtaacctgccttatccggggggataacagttagaaatgactgctaataccgcataagcgcacagaatcgcatgattccgtgtgaaaagatttatcgggataag

SEQ ID NO: 16 - DNA, 225 bp, Unknown
  Encodes 16S rRNA of Butyricicoccus - sensu stricto
agagtttgatcatggctcaggacgaacgctggcggcatgcctaacacatgcaagtcgaacggagtttaaggggcttgctccttaaacttagtggcggacgggtgagtaacgcgtgagcaacctgcctctcagtggggaataatgtactgaaaaggacactaataccgcatgacgtaccggagtcgcatggcactggtaccaaagatttatcgctgagagatgggc

SEQ ID NO: 17 - DNA, 225 bp, Unknown
  Encodes 16S rRNA from Lachnospiraceae incertae sedis
agagtttgatcatggctcaggatgaacgctggcggcgtgcttaacacatgcaagtcgaacggagtttagatgaaagcttgcttttgactaaacttagtggcggacgggtgagtaacgcgtgggtaacctgccttataccgggggacaacagttggaaacggctgctaataccgcataagcgcacgaggaggcatctcctagtgtgaaaaactccggtggtataag

SEQ ID NO: 18 - DNA, 225 bp, Unknown
  Encodes 16S rRNA from Anaeroplasma
agagtttgatcatggctcaggattaacgctggcggcgtgcctaatacatgcaagtcgaatggtagcaataccatggcgaacgggtgagtaacacgtaggtaacctgtctttaagacgaggataaccgttggaaacgacggataatactcgataggtgattttagggcatcctagaatcattaaagatttatcacttagagaggggcctgcggcgcattagctaga

SEQ ID NO: 19 - DNA, 225 bp, Unknown
  Encodes 16S rRNA from Clostridium sensu stricto
agagtttgatcatggctcaggacgaacgctggcggcgtgcctaacacatgcaagtcgagcggggacattgcgacggagacgaagtactcgtacggagtcaaagatgtaatgttctagcggcggacgggtgagtaacgcgtgagcaacctgtcccttacagggggataacacagcgaaagttgtactaataccgcatgagaccacaggatgacatcatccaggggt

SEQ ID NO: 20 - DNA, 225 bp, Unknown
  Encodes 16S rRNA from Butyricicoccus
agagtttgatcatggctcaggataaacgctggcggcgcacataagacatgcaagtcgaacggacttaaccgttagtttactaatggagcggttagtggcggactggtgagtaacgcgtaagcaatctgcctgttagagggggataacagtgagaaatcactgctaataccgcatatgctgtgaacatcacatgatgtaaacaggaaaggagcaatccgctaatag

SEQ ID NO: 21 - DNA, 225 bp, Unknown
  Encodes 16S rRNA from Butyricicoccus
agagtttgatcatggctcaggataaacgctggcggcgcacataagacatgcaagtcgaacgaacttaatcttttagtttactattagaagcggttagtggcggactggtgagtaacgcgtaaacaatctgcctatcagaggggaacaacagtgagaaatcactgctaataccgcatatgctgtgagtacggcatcgtacaaacaggaaaggagcaatccgctgat

SEQ ID NO: 22 - DNA, 225 bp, Unknown
  Encodes 16S rRNA from Rikenella
agagtttgatcatggctcaggatgaacgctagcggcaggcttaacacatgcaagtcgaggggcagcaggcggtagcaataccgtgctggcgaccggcgcacgggtgcgtaacgcgtatgcaacctacccactacagggggataacggagggaaacttccactaatatcccatggagttgttttttcgcatggagagacaactaaagctacggtggtagtggatgg

SEQ ID NO: 23 - DNA, 225 bp, Unknown
  Encodes 16S rRNA from Tannerella
agagtttgatcatggctcaggatgaacgctagcggcaggcttaacacatgcaagtcgaggggcagcggggtgtagcaatacactgccggcgaccggcgcacgggtgcgtaacgcgtatgcaacctgcccgtaacagggggataactcggggaaacccgaactaataccccgtattgacaaggggccgcatggtcttttgtcgaaagcttcggtggttacggatgg

SEQ ID NO: 24 - DNA, 225 bp, Unknown
  Encodes 16S rRNA from Howardella
agagtttgatcatggctcaggataaacgctggcggcgcacataagacatgcaagtcgaacggaagtcgttgtaatgatgtggacatgaacggagaacttgttcaaagagagtgaaaattgacttacaacaatggctttagtggcggactggtgagtaatgtataagtaacctgcctatcagaggggaacaacagttggaaacgactgctaataccgcatatgcca

SEQ ID NO: 25 - DNA, 225 bp, Unknown
  Encodes 16S rRNA from Prevotella
agagtttgatcatggctcaggatgaacgctagcggcaggcttaacacatgcaagtcgaggggcagcgtggagtagcaatactctgacggcgaccggcgaaagggtgagtaacgcgtgagcaacatgcccgtagttgggggatagtcgatggaaacgtcgcgtaataccccgtaacaacagaggccgcatgacctttgtttaagagatttattgtctacggattgg

SEQ ID NO: 26 - DNA, 225 bp, Unknown
  Encodes 16S rRNA from Butyricimonas
agagtttgatcatggctcaggatgaacgctagcggcaggcttaacacatgcaagtcgaggggcagcgggtgtagcaatacatgccggcgaccggcgaaagggtgagtaacgcgtgagcaacgtgcccgtatgtgggggatagtcgatggaaacgtcgcgtaataccccgtaacacattttcccgcatgggaatatgttgaaagatttattgcatacggatcggct

SEQ ID NO: 27 - DNA, 225 bp, Unknown
  Encodes 16S rRNA from Clostridium sensu stricto
agagtttgatcatggctcaggacgaacgctggcggcgtgcctaacacatgcaagtcgagcggggacatgcgacggataggaagttttcggatggaattgaagatgtatgttctagcggcggacgggtgagtaacgcgtgagcaacctgtccttcacagggggataacacagcgaaagttgtactaataccgcataagaccacagtgagacatctcacaggggtca

SEQ ID NO: 28 - DNA, 225 bp, Unknown
  Encodes 16S rRNA from Clostridium sensu stricto
agagtttgatcctggctcaggacgaacgctggcggcgtgcttaacacatgcaagtcgagcgatgaagttccttcgggaatggattagcggcggacgggtgagtaacacgtgggtaacctgcctcatagaggggaatagcctttcgaaaggaagattaataccgcataagattgtagcaccgcatggtgcagcaattaaaggagtaatccgctatgagatggaccc

SEQ ID NO: 29 - DNA, 225 bp, Unknown
  Encodes 16S rRNA from Saccharofermentans
agagtttgatcctggctcaggatgaacgctggcggcgtgcctaacacatgcaagtcgaacggagttactagagcttgctttggtaacttagtggcggacgggtgagtaatgtatgagcaacctgcctttcagagggggacaacagttggaaacgactgctaataccgcataatgtgcgaagggggcatcccttttgtaccaaaggagcaatccgctgaaagatgg

SEQ ID NO: 30 - DNA, 225 bp, Unknown
  Encodes 16S rRNA from Lachnospiraceae incertae sedis
agagtttgatcatggctcaggatgaacgctggcggcgtgcttaacacatgcaagtcgaacgaagcatttttcgattcttcggaaaagaggaatgactgagtggcggacgggtgagtaacgcgtgggaaacctgccttataccgggggatagcagttggaaacgactggtaaaaccgcataagcgcacgggtacgcatgtatctgtgtgaaaaactctggtggtat

SEQ ID NO: 31 - DNA, 225 bp, Unknown
  ITS2 sequence of Pyromyces
tcctccgcttattgatatgcttaagttcagcgggtactcttatctgatttgagatcaagttatttaattaaattttcctttgttggattttttctaaaaaaatacaaaattgtttaggttattcctttttacgggaaaattttatccaattttatattaaaattagaaaaaatttcaataatcaaaaaatttaaagtgaaacaacttgtatcgttgtaaaacact

SEQ ID NO: 32 - DNA, 225 bp, Unknown
  ITS2 sequence of Candida xylopsoci
tcctccgcttattgatatgcttaagttcagcgggtattcctacctgatttgaggtcgagctttttgttgtctcgcaacactcgctctcggccgccaagcgtccctgaaaaaaagtctagttcgctcggccagcttcgctccctttcaggcgagtcgcagctccgacgctctttacacgtcgtccgctccgctcccccaactctgcgcacgcgcaagatggaaacg

SEQ ID NO: 33 - DNA, 225 bp, Unknown
  ITS2 Sequence of Orpinomyces
tcctccgcttattgatatgcttaagttcagcgggtactcttatctgatttgagatcaagttagttttataattaaatttccttttttgtaggtcaatttaagttttaactttaaaactgaaaagtttattcctttttacgggaaaattttatccaattttaaaaataaaaccaaattggcttattaaaaaaatcaatttaaagtgaaacaacttgttatcgttgt

SEQ ID NO: 34 - DNA, 225 bp, Unknown
  ITS2 sequence of Orpinomyces
tcctccgcttattgatatgcttaagttcagcgggtactcttatctgatttgagatcaagttatttataaataaatttcctttaactgtacggtatggaaactattaaaatttctaaaaaactgaaatagctttattcctttttacgggaaaattttatccaattttttaaaaaaattaaaatcgttccaaccgacgatttcaattaaaatccatttaaagtgaaa

SEQ ID NO: 35 - DNA, 225 bp, Unknown
  ITS2 sequence of Orpinomyces
tcctccgcttattgatatgcttaagttcagcgggtactcttatctgatttgagatcaagttagtttataaattaaatttccttttttcaaggtcaatttaggattttatttttaaaactgaaaagtttattcctttttacgggaaaattttatccaattttaataataaaaccaaattggctttttaaaaaatcaatttaaagtgaaacaacttgttatcgttgt

SEQ ID NO: 36 - DNA, 225 bp, Unknown
  ITS2 sequence of Candida apicol
tcctccgcttattgatatgcttaagttcagcgggtagccttgcttgattggaggccaaaagattgtaagtaactgcacagagttatctaacgtgtgcacttccattcttttgactcctaaaaggagcagaacctcgtactacaatgaagtagtatgagagaaagatcggcgctccaacaagcatgccattaggagaacctaatggcgcaatgtgcgttcaaagat

SEQ ID NO: 37 - DNA, 225 bp, Unknown
  ITS2 sequence of Candida rugosa
tcctccgcttattgatatgcttaagttcagcgggtagtcctacctgatttgagaataagatcaagagtctgtaacaagcttaactgttttagacaatttcgtttctggcagacgcctgccggcgtggtgcccaacaccttgcgagagagaaatattgctcaaacaggcatgctgtgtggaatgccacacagcgcaatgtgcgttcaaagattcgatgattcacga

SEQ ID NO: 38 - DNA, 225 bp, Unknown
  ITS2 sequence of Neocallimastix
tcctccgcttattgatatgcttaagttcagcgggtactcttatctgatttgagatcaagttatttaaataaatttccttttaaaatcggaccgtttgttggtaataattaaaaaactgaaaagtttattcctttttacgggaaaattttatccaattttttattaaaaccataaatggtcttaaattaaaatgaatttaaagtgaaacaacttgtttatcgttgt

SEQ ID NO: 39 - DNA, 225 bp, Unknown
  ITS2 sequence of Orpinomyces
tcctccgcttattgatatgcttaagttcagcgggtactcttatctgatttgagatcaagttatttagttaaatttccttttaattaggcacaattaagttttaactattaaaactgaaaagttattcctttttacgggaaaattttatccaattttattagataaaaccaaaaattggcttttaaaaatcaatttaaagtgaaacaacttgtttatcgttgtaaa

SEQ ID NO: 40 - DNA, 225 bp, Unknown
  ITS2 sequence of Orpinomyces
tcctccgcttattgatatgcttaagttcagcgggtactcttatctgatttgagatcaagttatttataaataaatttcctttaactgtacggtatggaaactattaaaatttctaaaaaaactgaaatagcttattccttttttacgggaaaattttatccaattttttaaaaaaaattaaaatcgttcccaaccgacgatttcaattaaaatccatttaaagtg

SEQ ID NO: 41 - DNA, 225 bp, Unknown
  ITS2 sequence of Neocallimastix
tcctccgcttattgatatgcttaagttcagcgggtactcttatctgatttgagatcaagttatttaaataaatttccttttaaaatcggaccgagatttctctaactaaaactgaaaagtttattcctttttacgggaaaattttatccaattttaattattaaaaccataaaggtcttaattaaaatgaatttaaagtgaaacaacttgtttatcgttgtaaaa

SEQ ID NO: 42 - DNA, 225 bp, Unknown
  ITS2 sequence of Neocallimastix
tcctccgcttattgatatgcttaagttcagcgggtactcttatctgatttgagatcaagttatttaaattataaatttccttttaaaatcggaccgtttgttggtaataattaaaaaaactgaaaagtttattcctttttacgggaaaattttatccaatttttttttattaaaaccaaaaatggtcttaaattaaaatgaatttaaagtgaaacaacttgttta

SEQ ID NO: 43 - DNA, 225 bp, Unknown
  ITS2 sequence of Ascomycota
tcctccgcttattgatatgcttaagttcagcgggtagtcttgcttgatttgaggccaaatataaaaatatagtgttaatggctgcataactagaaccaagaatgcttagcactcgggctagtcacactgaccaccttctggctacatttagattcggtcctgagacttgaatcaaatcgcattgctgcataaaggtatgcggcactcaaacaaacatgcctcaaa

SEQ ID NO: 44 - DNA, 225 bp, Unknown
  ITS2 sequence of Piromyces
tcctccgcttattgatatgcttaagttcagcgggtactcttatctgatttgagatcaagttaatttttacttttttcctttttttatcaagaaaaatcaaaccaattttaattttttaaaattgtttaggttattcctttttacgggaaaattttatccaattttaaaaaatctttaaaattagcttttaatgattttttttgatgacaaagaatttaaagtgaa

SEQ ID NO: 45 - DNA, 225 bp, Unknown
  ITS2 sequence of Orpinomyces
tcctccgcttattgatatgcttaagttcagcgggtactcttatctgatttgagatcaagttagttttataattaaatttccttttttcaaggtcaattaggattttatttttaaaactgaaaagtttattccttttttacgggaaaattttatccaattttaataataaaaaccaaattggctttttaaaaaatcaatttaaagtgaaacaacttgttatcgttg

SEQ ID NO: 46 - DNA, 225 bp, Unknown
  ITS2 sequence of Cyllamyces
tcctccgcttattgatatgcttaagttcagcgggtactcttatctgatttgagatcaagttaatttgacttttcctttttatgtcaaaagaaatcgctaattttaatattttttaaaattgtttaggttattcctttttacaggaaaattttatccaattttaaaaaaaatctttaaaattagtttaatgattttttttgataacaaagaatttaaagtgaaaca

SEQ ID NO: 47 - DNA, 225 bp, Unknown
  ITS2 sequence of Piromyces
tcctccgcttattgatatgcttaagttcagcgggtactcttatctgatttgagatcaagttaatttgactttttccttttttaattcaaaaagaaatcaaaccaatttcatttttcttaaaattgtttaggttattccttttttacgggaaaattttatccaattttaaaaaaaatctttaaaattagtttttaaatgattttttttgataacaaagaatttaaa

SEQ ID NO: 48 - DNA, 225 bp, Unknown
  ITS2 sequence of Cyllamyces
tcctccgcttattgatatgcttaagttcagcgggtactcttatctgatttgagatcaagttaatttttacttttttttccttgttagatctttttaaaaaatcaaactaattcatttattaaaattgtttaggttattcctttttacgggaaaattttatccaattttaaaaaaaaatcagtttttaaatgattttttaataagacaaagaatttaaagtgaaac

SEQ ID NO: 49 - DNA, 225 bp, Unknown
  ITS2 sequence of Piromyces
tcctccgcttattgatatgcttaagttcagcgggtactcttatctgatttgagatcaagttatttaattaaattttcctttacttgggattttttctaaaaaaaatacaaaattgtttaggttattcctttttacgggaaaattttatccaattttatattaaaattagaaaaaatttcaataacaaaaaatttaaagtgaaacaacttgtatcgttgtaaaaca

SEQ ID NO: 50 - DNA, 225 bp, Unknown
  ITS2 sequence of Piromyces
tcctccgcttattgatatgcttaagttcagcgggtactcttatctgatttgagatcaagttaatttttactttttcctttttttatcaagaaaaatcaaaccaattttaattttttaaaattgtttaaggttattcctttttacgggaaaattttatccaattttaaaaaatctttaaaattagcttttaatgatttttttgatgacaaagaatttaaagtgaaa

SEQ ID NO: 51 - DNA, 225 bp, Unknown
  ITS2 sequence of Neocallimastix
tcctccgcttattgatatgcttaagttcagcgggtactcttatctgatttgagatcaagttatttaaaataaatttccttttaaaatcggaccgagatttctctaactaaaactgaaaagtttattcctttttacgggaaaattttatccaattttaattattaaaaccataaggtcttaaattaaaatgaatttaaagtgaaacaacttgtttatcgttataaa

SEQ ID NO: 52 - DNA, 225 bp, Unknown
  ITS2 sequence of Piromyces
tcctccgcttattgatatgcttaagttcagcgggtactcttatctgatttgagatcaagttatttttaaataaattttccttttattttgaaaaattctaattaaaaattaaaattgtttaggttattcctttttacaggaaaattttatccaattttattttaaaattagaaaaaaatttcaaattttaaaaaaatttaaagtgaaacaacttgtatcgttgta

SEQ ID NO: 53 - DNA, 225 bp, Unknown
  ITS2 sequence of Neocallimastix
tcctccgcttattgatatgcttaagttcagcgggtactcttatctgatttgagatcaagttatttaaattataaatttccttttaaaatcggaccgagatttctctaactaaaactgaaaagtttattccttttttacgggaaaattttatccaattttaattattaaaaccatattggtcttaattaaaatgaatttaaagtgaaacaacttatttatcgttgt

SEQ ID NO: 54 - DNA, 225 bp, Unknown
  ITS2 sequence of Saccharomycetales
tcctccgcttattgatatgcttaagttcagcgggtattcctacctgatctgaggtcgagctcatagtgctcggagaccccaagcgtcctgttctagttcgctcgtggcctcgtttcttttcggcggggccgtggccgggccagctctgcgcaactctcgtcttgcaagaaggaaacgacgctcagacaggcatgcccgccggaatgccgacgggcgcaatgtgcg

SEQ ID NO: 55 - DNA, 225 bp, Unknown
  ITS2 sequence of Piromyces
tcctccgcttattgatatgcttaagttcagcgggtactctcttatctgatttgagatcaagttatttaattaaattttccttttggattttttctaaaaaaatacaaaattgtttaggttattcctttttacgggaaaattttatccaattttatattaaaattagaaaaaatttcaataacaaaaaatttaaagtgaaacaacttgtatcgttgtaaaacactc

SEQ ID NO: 56 - DNA, 225 bp, Unknown
  ITS2 sequence of Orpinomyces
tcctccgcttattgatatgcttaagttcagcgggtactcttatctgatttgagatcaagttatttataaataaatttcctttaactgtaccggtatggaaattattaaaattagaaaaaatttcaataatcaaaaaatttaaagtgaaacaacttgtatcgttgtaaaacactcatcaccataaaaacaaaaaagtttttatgagaatattttactgatactcaa

SEQ ID NO: 57 - DNA, 225 bp, Unknown
  ITS2 sequence of Piromyces
tcctccgcttattgatttgcttaagttcagcgggtactcttatctgatttgagatcaagttatttaattaaattttcctttacttgggattttttctaaaaaaaatacaaaattgtttaggttattcctttttacgggaaaattttatccaattttatattaaaattagaaaaaatttcaataatcaaaaaatttaaagtaaaacaacttgtttatcgttgtaaa

SEQ ID NO: 58 - DNA, 225 bp, Unknown
  ITS2 sequence of Phyllosticta capitalensis
tcctccgcttattgatatgcttaagttcagcgggtagtcctacctgatttgaggtcagagattaagaaatattggtgttgtaagcagacactgaccactcgggtgacgaaacttattacgtcaagctaatgggtcatccactaacgcatttaaggcgagccagatggcaacgcccaagtccaagccgattaggaaaccctaatggttgatatttcatgacactca

SEQ ID NO: 59 - DNA, 225 bp, Unknown
  ITS2 sequence of Orpinomyces
tcctccgcttattgatatgcttcagttcagcgggtactcttatctgatttgagatcaagttatttataaataaatttcctttaaactgtacggtatggaaactattaaaatttctaaaaaactgaaatagtttattcctttttacgggaaaattttatccaattttttaaaaaaattaaatcgttccaaccgacgatttcaattaaaatccatttaaagtgaaac

SEQ ID NO: 60 - DNA, 225 bp, Unknown
  ITS2 sequence of Orpinomyces
tcctcgcttattgatatgcttagttcagcgggtactcttatctgatttgagatcaagttatttataaataaatttcctttaactgtacggtatggaaactaattaaaatttctaaaaaactgaaatagcttattccttttttacgggaaaattttatccaattttttaaaaaaattaaaatcgttcccaaccgacgatttcaattaaaatccatttaaagtgaaa

SEQ ID NO: 61 - DNA, 225 bp, Unknown
  Encodes 16S rRNA from Corynebacterium
agagtttgatcctggctcaggacgaacgctggcggcgtgcttaacacatgcaagtcgaacggaaaggcccagcttgctgggtgctcgagtggcgaacgggtgagtaacacgtgggtgatctgcccctaacttcgggataagcttgggaaactgggtctaataccggataggacaatcgtttagtgtcggttgtggaaagttttttcggttagggatgagcccgcg

SEQ ID NO: 62 - DNA, 225 bp, Unknown
  Encodes 16S rRNA from Prevotella
agagtttgatcatggctcaggatgaacgctagctacaggcttaacacatgcaagtcgaggggtaacatgaagaaagcttgctttctttgatgacgaccggcgcacgggtgagtatcgcgtatccaacctgcccataagtagggaatagccttgcgaaagtaagattaatgccctatggtttccattaaagacatctgagatggaataaagatttatcgcttatgg

SEQ ID NO: 63 - DNA, 225 bp, Unknown
  Encodes 16S rRNA from Comamonas
agagtttgatcctggctcagattgaacgctggcggcatgccttacacatgcaagtcgaacggtaacgggtccttcgggatgccgacgagtggcgaacgggtgagtaatacatcggaacgtgcctggtagtgggggataactactcgaaagagtggctaataccgcatgagatctcaggatgaaagcaggggaccctcgggccttgcgctatcagagcggccgatg

SEQ ID NO: 64 - DNA, 225 bp, Unknown
  Encodes 16S rRNA from Clostridium XlVa
agagtttgatcctggctcaggatgaacgctggcggcgtgcctaacacatgcaagtcgaacgagcgagagatgaaacctagtgattctcaagcgagtggcggacgggtgagtaacgcgtgggtaacctgccttacagagggggataacagtctgaaaagactgctaataccgcataagcacacagtaccgcatggtacagggtgaaaagatttatcactgtaagat

SEQ ID NO: 65 - DNA, 225 bp, Unknown
  Encodes 16S rRNA from Hippea
agagtttgatcatggctcagagttaacgctggcggcgtgcctaacacatgcaagtcgagcgaattcttacagagtatcgtaagagttagcggcaaacgggtgagtaacacatgggaaacctcccttagaatggggaacatctccgtgaaaacggagctaataccgcataagaccacagtttggcatcaaacaggggtaaaagcagcaatgcgttctaagatggtc

SEQ ID NO: 66 - DNA, 225 bp, Unknown
  Encodes 16S rRNA from Anaerovorax
agagtttgatcatggctcaggatgaacgctggcggcgtgcctaacacatgcaagtcgagcgagaaacctgtaattgacgcttcggtagattttacaggcggaaagcggcggacgggtgagtaacgcgtaggcaacctgccccatgcacagggatagcctcgggaaaccgggattaaaacctgatgataccgcattgtcacatgacggagcggtcaaagatttatc

SEQ ID NO: 67 - DNA, 225 bp, Unknown
  Encodes 16S rRNA from Clostridium XlVa
agagtttgatcatggctcaggatgaacgctggcggcgtgcctaacacatgcaagtcgaacggaaatgtttagatgaagttttcggatggattcttttcattttagtggcggacgggtgagtaacacgtgggtaacctgccctgtaccgggggataacacttagaaataggtgataataccgcataagcgcacactgacgcatgtcagagtgtgaaaaactccggt

SEQ ID NO: 68 - DNA, 225 bp, Unknown
  Encodes 16S rRNA from Rummeliibacillus
agagtttgatcctggctcaggacgaacgctggcggcgtgcctaatacatgcaagtcgagcgaatgacgaggagcttgctcctctgatttagcggcggacgggtgagtaacacgtgggtaacctgccctgtagactgggataacttcgggaaaccggagctaataccggataatccttttaacctcatggttttaagttgaaaggcgcttcggcgtcactacagga

SEQ ID NO: 69 - DNA, 225 bp, Unknown
  Encodes 16S rRNA from Clostridium XlVa
agagtttgatcctggctcaggatgaacgctggcggcgtgcctaacacatgcaagtcgaacggaaatgttttgatgaagatttcggttggattcatttcattttagtggcggacgggtgagtaacacgtgggtaacctgccctgtaccgggggataacacttagaaataggtgataataccgcataagcgcacactgacgcatgtcagagtgtgaaaaactccggt

SEQ ID NO: 70 - DNA, 225 bp, Unknown
  Encodes 16S rRNA from Lachnospiracea incertae sedis
agagtttgatcctggctcaggatgaacgctggcggcgtgcttaacacatgcaagtcgagcgaagcactctggaagattccttcgggatgattccttagtgacttagcggcggacgggtgagtaacgcgtgggcaacctgccttgtacagggggataacagttagaaatgactgctaataccgcataagcacacagcatggcatcatgcagtgtgaaaaactccgg

SEQ ID NO: 71 - DNA, 225 bp, Unknown
  Encodes 16S rRNA from Prevotella
agagtttgatcatggctcaggatgaacgctagctacaggcttaacacatgcaagtcgaggggcatcaggacggtagcttgctatcgttgctggcgaccggcgcacgggtgagtaacgcgtatccaaccttcccatgactccggttcagcccgccgaaaggcggattactcccggatggtttccgaagagggcatctgatttggaataaagattgatcggtcatgg

SEQ ID NO: 72 - DNA, 225 bp, Unknown
  Encodes 16S rRNA from Anaerovorax
agagtttgatcatggctcaggatgaacgctggcggcgtgcctaacacatgcaagtcgagcgagaaacctgcaaatgaagtttcgacagattttacaggcggaaagcggcggacgggtgagtaacgcgtaggcaacctgccccttgcacagggatagcctcgggaaaccgggattaaaacctgataacaccgcactttcacatgtaagagcggtcaaagatttatc

SEQ ID NO: 73 - DNA, 225 bp, Unknown
  Encodes 16S rRNA from Pseudoflavonifractor
agagtttgatcatggctcaggacgaacgctggcggcgtgcttaacacatgcaagtcgaacggacgatttcccttcggggagaaagttagtggcggacgggtgagtaacgcgtgagtaacctgccttggaatgggggataacacagggaaacctgtgctaataccgcataacatcgcgttggggcatcccaatgcgatcaaagatttattgttccaagatgggctc

SEQ ID NO: 74 - DNA, 225 bp, Unknown
  Encodes 16S rRNA from Prevotella
agagtttgatcatggctcaggatgaacgctagctacaggcttaacacatgcaagtcgaggggcagcatgtatctggcttgccagatatgatggcgaccggcgcacgggtgcgtaacgcgtgttcgacctaccctttactcgggaacagcccatcgaaagatggattaatgcccgatgttctccctatatcgcatggtatttggagcaaagatttatcggtagagg

SEQ ID NO: 75 - DNA, 225 bp, Unknown
  Encodes 16S rRNA from Clostridium XlVa
agagtttgatcctggctcaggatgaacgctggcggcgtgcctaacacatgcaagtcgagcggagatacttgataagcttgcttaatgagtatcttagcggcggatgggtgaggaacgcgtggagaacctgcccttcacagggggataacagctggaaacggctgttaataccgcatatgctcacagcgccgcatggcgcagggaggaaagcgcacagtggtgaag

SEQ ID NO: 76 - DNA, 225 bp, Unknown; identical to SEQ ID NO: 75
  Encodes 16S rRNA from Clostridium XlVa

SEQ ID NO: 77 - DNA, 184 bp, Unknown
  Encodes 16S rRNA from Coprococcus
agagtttgatcatggctcaggataaacgctggcggcgtgctttggacaatgggggaaaccctgatccagcgacgccgcgtgaacgatgaagtatttcggtatgtaaagttctatcagcagggaagataatgacggtacctgactaagaagcaccggctaaatacgtgccagcagccgcggtaat

SEQ ID NO: 78 - DNA, 225 bp, Unknown
  Encodes 16S rRNA from Pyramidobacter
agagtttgatcatggctcaggatgaacgctggcggcgtgcttaacacatgcaagttgcgcggggatctgacgatgagacttcggtggatttgttagatccaagcggcggacgggtgagtaaagcacaaggacgtgtccgagcgagggggacaactgcgggaaaccgtagctaataccccgtaagccgagaggtgaaagcagcaatgcgcgagcggagcgacttgt

SEQ ID NO: 79 - DNA, 225 bp, Unknown
  Encodes 16S rRNA from Syntrophococcus
agagtttgatcctggctcaggatgaacgctggcggcgtgcctaacacatgcaagtcgagcggagtgtgacgagtgcttgcacatgtcatacttagcggcggatgggtgaggaacgcgtggagaacctgcctctcacagggggataacagttggaaacgactgttaataccgcatatgctcacggtgccgcatggcacagggaggaaagatttcatcggtgagaga

SEQ ID NO: 80 - DNA, 225 bp, Unknown
  Encodes 16S rRNA from Prevotella
agagtttgatcctggctcaggatgaacgctagctacaggcttaacacatgcaagtcgaggggcagcatgttgtgtgcttgcacacaatgatggcgaccggcgcacgggtgagtaacgcgtatccaaccttcccatgactccggttcagcccgccgaaaggcggattactcccggatggtttccgaagagggcatctgatttggaataaagattgatcggtcatgg

SEQ ID NO: 81 - DNA, 225 bp, Unknown
  Encodes 16S rRNA from Clostridium XlVa
agagtttgatcctggctcaggatgaacgctggcggcgtgcctaacacatgcaagtcgaacgaagcactttggaagcttgcttttaaagtgactgagtggcggacgggtgagtaacgcgtggataacctgcctcacacagggggataacagttagaaatgactgctaataccgcatatgcctacagtaccgcatggtacaggagggaaagatttatcggtgtgaga

SEQ ID NO: 82 - DNA, 225 bp, Unknown
  Encodes 16S rRNA from Prevotella
agagtttgatcatggctcaggatgaacgctagctacaggcttaacacatgcaagtcgcggggcatcatgacgatagcttgctattgttgatggcgaccggcgcacgggtgagtaacgcgtatccaacctgcccccaagtagggcacagcccggcgaaagtcggattaattccctatgtggtcatgttatggcatcagtatatgactaaaggctttggttgcttgg

SEQ ID NO: 83 - DNA, 225 bp, Unknown
  Encodes 16S rRNA from Roseburia
agagtttgatcatggctcaggatgaacgctggcggcgtgcttaacacatgcaagtcgaacgaagcacctggtcacgatcccttcggggtgacgaccttgtgactgagtggcggacgggtgagtaacgcgtgggaaacctgccatgtactgggggataacagttggaaacgactgctaataccgcataaaactgtcggatcgcatgatctgatagccaaaactccg

SEQ ID NO: 84 - DNA, 225 bp, Unknown
  Encodes 16S rRNA from Clostridium XlVa
agagtttgatcctggctcaggatgaacgctggcggcgtgcctaacacatgcaagtcgagcggagaggttgcggagattcaatcgatgatctgcttcttcttagcggcggatgggtgagtaacacgtgggtaacctgccctgcactggggaataacagttggaaacgactgttaataccgcatatgcgcacggggtcgcatgaccccgggcggaaagatttatcgg

SEQ ID NO: 85 - DNA, 225 bp, Unknown
  Encodes 16S rRNA from Lachnospiracea incertae sedis
agagtttgatcctggctcaggatgaacgctggcggcgtgcttaacacatgcaagtcgagcgaagcactctggaagattccttcgggatgattccttagtgacttagcggcggacgggtgagtaacgcgtgggcaacctgccttgtacagggggataacagttagaaatgactgctaataccgcataagcgcacagcatggcatcatgcagtgcgaaaaactccgg

SEQ ID NO: 86 - DNA, 225 bp, Unknown
  Encodes 16S rRNA from Clostridium XlVa
agagtttgatcctggctcaggatgaacgctggcggcgtgcttaatacatgcaagtcgaacggagtacttagaagaagttttcggaccaattctttgtacttagtggcggacgggtgagtaacgcgtgggtaacctgccgtatgcagggggacaacagccggaaacagctgctaataccgcataagccggcagcaccgcatggtgcagtcggaaaagatttatcgg

SEQ ID NO: 87 - DNA, 225 bp, Unknown
  Encodes 16S rRNA from Acidothermus
agagtttgatcctggctcaggatgaacgctggcggcgtgcttaacacatgcaagtcgaacgagaacgttcccttcggggaactagtaaagtggcgaacgggtgagtaacacgtgggcaacctaccccttacattgggataacgcagagaaatttgcgctaataccggatacttcgttttgagggcatcctcgttacgagaaagcttttgcggtaagggatgggcc

SEQ ID NO: 88 - DNA, 225 bp, Unknown
  Encodes 16S rRNA from Adlercreutzia
agagtttgatcctggctcaggatgaacgctggcggcgtgcctaacacatgcaagtcgaacggttaaaccggcttcggccggaaatagagtggcgaacgggtgagtaacacgtgaccaacctgccccgcgcaccgggatagccccccgaaagggggattaataccggatgcgccgggagggccgcatggccctcccgggaaagcctttgcggcgcgggatggggtc

SEQ ID NO: 89 - DNA, 225 bp, Unknown
  Encodes 16S rRNA from Prevotella
agagtttgatcctggctcaggatgaacgctagctacaggcttaacacatgcaagtcgaggggcagcatgggagttgcttgcaattcccgatggcgaccggcgcacgggtgagtaacgcgtatccaaccttcccttaactccggaatagcccgctgaaaggcggattaatgccggatgcggtccagcgagggcatctgacccggaccaaaggttttctccggttaa

SEQ ID NO: 90 - DNA, 225 bp, Unknown
  Encodes 16S rRNA from Lachnospiracea incertae sedis
agagtttgatcctggctcaggatgaacgctggcggcgtgcctaacacatgcaagtcgaacggggtaaggacaccggatgaagattcgtcagattccaccgtccttacttagtggcggacgggtgagtaacgcgtgggcaacctgccctgtacaggggaatagcagctggaaacggctggtaaaaccgcatatgcgcgcagtaccgcatggtacagcgcggaaaac

SEQ ID NO: 91 - DNA, 225 bp, Unknown
  Encodes 16S rRNA from Proteiniclasticum
agagtttgatcatggctcaggacgaacgctggcggcgtgcctaacacatgcaagtcgagcggggattatgctggaaggttttcggactggaaggtatgatcttagcggcggacgggtgagtaacgcgtgagcaacctgccttcaacagggggataacgcatcgaaagatgtgctaataccgcgtaagaccatagtaccgcatggtacaggggtcaaaggagcaat

SEQ ID NO: 92 - DNA, 225 bp, Unknown
  Encodes 16S rRNA from Lachnospiracea incertae sedis
agagtttgatcctggctcaggataaacgctggcggcgtgcttaacacatgcaagtcgaacggggttatttcgagtagcttgctacatgaaataacctagtggcggacgggtgagtaacgcgtgggaaacctgcctcgtactgggggataacagttggaaacgactgttaataccgcataagcgcacgatgtcgcatgacatagtgtgaaaaactccggtggtacg

SEQ ID NO: 93 - DNA, 225 bp, Unknown
  Encodes 16S rRNA from Anaerovorax
agagtttgatcctggctcaggatgaacgctggcggcgtgcctaacacatgcaagtcgagcgtgattcactgaaatgatacttcggtagaaatttcagtgatgaaagcggcggacgggtgagtaacgcgtaggcaacctgccctttgcagggggatagccgttggaaacgacgattaaaaccccataatgcagcctgatctcctgttcgggctgccaaagatttat

SEQ ID NO: 94 - DNA, 225 bp, Unknown
  Encodes 16S rRNA from Prevotella
agagtttgatcctggctcaggatgaacgctagctacaggcttaacacatgcaagtcgaggggcagcagggcaatagcttgctattgttgctggcgaccggcgcacgggtgagtaacgcgtatccaacctaccccgcggtcagggacagcccggcgaaagtcggattaatacctgatgcagtcagaagagggcatctgattttgacgaaagattgatcgcctcggg

SEQ ID NO: 95 - DNA, 225 bp, Unknown
  Encodes 16S rRNA from Bacteroides
agagtttgatcctggctcaggatgaacgctagctacaggcctaacacatgcaagtcgcggggcagcattgaggtagcaatacctcagatggcgaccggcgcacgggtgcgtaacgcgtatccaacctggcccttactcgggtatagccctgcgaaagtaggattaatccccgatgttgtcaagatggagccttttttcttgaccaaaggcattagtcggtaaggg

SEQ ID NO: 96 - DNA, 225 bp, Unknown
  Encodes 16S rRNA from Clostridium III
agagtttgatcatggctcaggacgaacgctggcggcatgcctaacacatgcaagtcgaacggagttacaagagcttgcttttgtaacttagtggcggacgggtgagtaacgcgtgagcaacctacccttcagtggggaataatgttttgaaaagaacactaataccgcatgacatatgaccaccgcatgatggacatatcaaaggatttatttgctgaaggatgg

SEQ ID NO: 97 - DNA, 225 bp, Unknown
  Encodes 16S rRNA from Prevotella
agagtttgatcatggctcaggatgaacgctagctacaggcttaacacatgcaagtcgaggggcagcgggaggaaagcttgctttccttgccggcgaccggcgcacgggtgcgtaacgcgtatcgaacctggcccatacacggggatagtctcctgaaagggaggttaatacccggcggtcccacttggtcgcatgactgtgtgggtgaagattcatcggtatggg

SEQ ID NO: 98 - DNA, 225 bp, Unknown
  Encodes 16S rRNA from Acinetobacter
agagtttgatcatggctcagattgaacgctggcggcaggcttaacacatgcaagtcgagcggagataggtagcttgctactgattcttagcggcggacgggtgagtaatgcttaggaatctgcctattagtgggggacaacgtttcgaaagggacgctaataccgcatacgccctacgggggaaagcaggggatcttcggaccttgcgctaatagatgagcctaa

SEQ ID NO: 99 - DNA, 225 bp, Unknown
  Encodes 16S rRNA from Erysipelothrix
agagtttgatcctggctcaggataaacgctggcggcgtgcctaatacatgcaagtcgaacggacatagcttgctatgtcagtggcgaacgggtgagtaatacataagcaacctgcctacagggaccgggataacacttggaaacgagcgctaataccggataggcaggatcggggcatcctgatcctgttaaagttgagagacacaagtagatgggcttatggcg

SEQ ID NO: 100 - DNA, 225 bp, Unknown
  Encodes 16S rRNA from Bacteroides
agagtttgatcatggctcaggatgaacgctagctacaggcttaacacatgcaagtcgaggggcagcattaagtcagcttgctgatttagatggcgaccggcgcacgggtgagtaacgcgtatccaacctgccccctacccggggatagccttgcgaaagtaagattaatacccggtgcagttatgattccgcatgggaatataacgaaagattcatcggtagggg

SEQ ID NO: 101 - DNA, 225 bp, Unknown
  Encodes 16S rRNA from Clostridium XlVa
agagtttgatcctggctcaggatgaacgctggcggcgtgcctaacacatgcaagtcgaacggagatattacggatgaaggattcgtctggaatctgttttatcttagtggcggacgggtgagtaacgcgtggagaacctgcctctttccgggggatagcagttggaaacgactggtaataccgcatgagcgcacagtaccgcatggtacggggtgaaaagattta

SEQ ID NO: 102 - DNA, 225 bp, Unknown
  Encodes 16S rRNA from Butyrivibrio
agagtttgatcatggctcaggatgaacgctggcggcgtgcctaacacatgcaagtcgaacggagtttagatgaaacctagtgattctaaacttagtggcggacgggtgagtaacgcgtgggtaacctgccctatagagtgggatagcagttagaaatgactgataataccacataagaccacagtacggcatcgtacaggggtcaaagatttatcgctataggat

SEQ ID NO: 103 - DNA, 225 bp, Unknown
  Encodes 16S rRNA from Eubacterium
agagtttgatcctggctcaggatgaacgctggcggcgtgcctaacacatgcaagtcgagcgagatatccatgacgaattcttcggatgcctgaatggatggaaagcggcggacgggtgagtaacgcgtaggtaacctgccctgtacaaggggatagccactggaaacggtgattaataccttatgacaccgcagcatcacatggtgaagcggtcaaagattttat

SEQ ID NO: 104 - DNA, 225 bp, Unknown
  Encodes 16S rRNA from Prevotella
agagtttgatcctggctcaggatgaacgctagctacaggcttaacacatgcaagtcgaggggcagcatgaaggaagcttgcttcctttgatggcgaccggcgcacgggtgagtaacgcgtatccaaccttcccttaacttgggaatagcccggtgaaaaccggattaatgcccgatgtggtccagcgagggcatctgacccggaccaaagagtttttcggttaag

SEQ ID NO: 105 - DNA, 225 bp, Unknown
  Encodes 16S rRNA from Eubacterium
agagtttgatcatggctcaggatgaacgctggcggcgtgcttaacacatgcaagtcgagcgagaaacttacagatgacgcttcggttgattcagtaagcggaaagcggcggacgggtgagtaacgcgtaggcaacctgcccctggcagagggatagcatcgggaaactgatattaagacctcataacgcatccatatcacatgatgaggatgccaaagatttatc

SEQ ID NO: 106 - DNA, 225 bp, Unknown
  Encodes 16S rRNA from Prevotella
agagtttgatcatggctcaggatgaacgctagctacaggcttaacacatgcaagtcgaggggcagcatgacgagtgcttgcacttgttgatggcgaccggcgcacgggtgcgtaacgcgtatcgaaccttccccttactcgggaatagcccggtgaaaaccgaattaatgcccgatatatatttagatggcatcagaagagtatgaaagatttatcggtaaggga

SEQ ID NO: 107 - DNA, 225 bp, Unknown
  Encodes 16S rRNA from Lachnospiracea incertae sedis
agagtttgatcatggctcaggatgaacgctggcggcgtgcctaacacatgcaagtcgaacggaccttttacagactgcgattcgtcaaaggaagttcaaggttagtggcggacgggtgagtaacgcgtgggtaacctgcctcgtagagggggataacagttggaaacgattgctaataccgcataagcccacaggaccgcatggtccagggggaaaagattcatc

SEQ ID NO: 108 - DNA, 225 bp, Unknown
  Encodes 16S rRNA from Coprococcus
agagtttgatcatggctcaggatgaacgctggcggcgtgcctaacacatgcaagtcgaacggagtgttacttcttcggagggaacacttagtggcggacgggtgagtaacgcgtgggtaacctgcctcatacagggggatagcagttggaaacgactgataataccgcataagcgcacagtaccgcatggtacagtgtgaaaaactccggtggtatgagatggac

SEQ ID NO: 109 - DNA, 204 bp, Unknown
  Encodes 16S rRNA from Prevotella
agagtttgatcatggctcaggatgaacgctagctacaggctttggtcaatgggcgagagcctgaaccagccaagtagcgtgcaggatgacggccctatgggttgtaaactgcttttgtatggggataaagtgctccacgtgtggagttttgtaggtaccatacgaataaggaccggctaattccgtgccagcagccgcggtaat

SEQ ID NO: 110 - DNA, 225 bp, Unknown
  Encodes 16S rRNA from Clostridium XlVa
agagtttgatcatggctcaggatgaacgctggcggcgtgcttaacacatgcaagtcgaacgaagcattttggttcaaagccttcgggcagcgaaacttaatgacttagtggcggacgggtgagtaacgcgtgggtaacctgccttgtactgggggataacagttagaaatgactgctaataccgcataagcccacggtttcgcatggaactgtgagaaaagattt

SEQ ID NO: 111 - DNA, 225 bp, Unknown
  Encodes 16S rRNA from Prevotella
agagtttgatcatggctcaggatgaacgctagctacaggcttaacacatgcaagtcgaggggcagcatgtaggttgcttgcaacctatgatggcgaccggcgcacgggtgcgtaacgcgtatccaaccttccccgcagtagggtgcagcccgttgaaagacggattaatcccctatgttgtccattgacggcatccgatttggacgaaagatttcatcgctgcgg

SEQ ID NO: 112 - DNA, 225 bp, Unknown
  Encodes 16S rRNA from Catonella
agagtttgatcctggctcaggatgaacgctggcggcgtgcctaacacatgcaagtcgaacggaggacttcggaagaagtcttcggatggattccgatgttcttagtggcggacgggtgagtaacgcgtgggtaatctgccctgtatcggggaatagcagctggaaacggctggtaataccgcgtacgccggttggatcgcatgatccgatcgggaaactttttaa

SEQ ID NO: 113 - DNA, 225 bp, Unknown
  Encodes 16S rRNA from Methanobrevibacter
agagtttgatcatggcagaagctactgctattgggattcgattaagccatgcaagtcgaacgaatttagattcgtggcgtacggctcagtaacacgtggataacctacccttaggactgggataactctgggaaactggggctaataccggatagatgatttttcttggaatgggattttgtttaaatgttttttcgcctaaggatgggtctgcggcagattagg

SEQ ID NO: 114 - DNA, 225 bp, Unknown
  Encodes 16S rRNA from Ruminococcus
agagtttgatcctggctcaggacgaacgctggcggcacgcctaacacatgcaagtcgaacggtgaatacttagcttgctttgtattcatagtggcggacgggtgagtaacacgtgagcaacctgcctctgagagagggatagcttctggaaacggatggtaatacctcatgatatagcgttctcgcatgagaatgctatcaaacgaatttcgctcagagatgggc

SEQ ID NO: 115 - DNA, 225 bp, Unknown
  Encodes 16S rRNA from Lachnospiracea incertae sedis
agagtttgatcatggctcaggatgaacgctggcggcacgcttaacacatgcaagtcgaacgaggcgaggagtgcttgcacaccgaacctagtggcggacgggtgcgtaacgcgtgggtaacctgccctaaacagggggataacgtatagaaatgtacgctaataccgcataagctcacggaaccgcatggttttgagggaaaaggatttccggtttaggatgggc

SEQ ID NO: 116 - DNA, 184 bp, Unknown
  Encodes 16S rRNA from Coprococcus
agagtttgatcatggctcaggataaacgctggcggcgtgctttgcacaatgggggaaaccctgatgcagcgacgccgcgtgagtgatgaagtatctcggtatgtaaagctctatcagcagggaagataatgacggtacctgactaagaagcaccggctaaatacgtgccagcagccgcggtaat

SEQ ID NO: 117 - DNA, 225 bp, Unknown
  Encodes 16S rRNA from Clostridium XlVa
agagtttgatcatggctcaggatgaacgctggcggcgtgcctaacacatgcaagtcgaacgaagcacttaattacgatcccttcggggtgacgattttgtgacttagtggcggacgggtgagtaacgcgtgggtaacctgccctgtactgggggacaacagttggaaacggctgctaataccgcataagcgcacgatatcgcatggtattgtgtgaaaaactccg

SEQ ID NO: 118 - DNA, 225 bp, Unknown
  Encodes 16S rRNA from Lachnospiracea incertae sedis
agagtttgatcatggctcaggataaacgctggcggcgtgcttaacacatgcaagtcgaacggggttatttcgagaagcttgcttcatgaaataacctagtggcggacgggtgagtaacgcgtgggaaacctgcctcgtactgggggataacagttggaaacgactgttaataccgcataagcgcacaatgttgcatgacatagtgtgaaaaactccggtggtacg

SEQ ID NO: 119 - DNA, 225 bp, Unknown
  Encodes 16S rRNA from Prevotella
agagtttgatcctggctcaggatgaacgctagctacaggcttaacacatgcaagtcgcggggcagcatgttgtgtgcttgcacacaatgatggcgaccggcgcacgggtgcgtaacgcgtatccaacctgccccttactctggaatagcccggcgaaagtcggattaatgccggatgttgtcagatgaggacatctgagtttgaccaaaggcttctgccggtaag

SEQ ID NO: 120 - DNA, 225 bp, Unknown
  Encodes 16S rRNA from Anaerovorax
agagtttgatcatggctcaggatgaacgctggcggcgtgcctaacacatgcaagtcgagcgagaaacttatgattgacgcttcggttgatttcataagcggaaagcggcggacgggtgagtaacgcgtaggcaacctgccccttgcagagggatagcctcgggaaaccgggattaaaacctcataatgctgatcctacacatgtttgatcagccaaagatttatc

SEQ ID NO: 121 - DNA, 225 bp, Unknown
  Encodes 16S rRNA from Asteroleplasma
agagtttgatcctggctcaggataaacgccggcggcgtgcctaatacatgcaagtcgaacgagaggtagcaatacctcgagtggcgtacgggtgagtaacacgttgggaacctgccccagggaccggaataccagacggaaacgtctgctaatgccggatgacgatccggaagcgtcggcttccggatccaaaggcggccttcaagccgcgccacgggatggccc

SEQ ID NO: 122 - DNA, 225 bp, Unknown
  Encodes 16S rRNA from Clostridium XlVa
agagtttgatcctggctcaggatgaacgctggcggcgcgcataacacatgcaagtcgaacggagtttagatgaaacctagtgattttaaacttagtggcggacgggtgagtaacgcgtgggtaacctacctggtattgggggacaacagttagaaatgactgctaataccgcatacgacatcggagaggcatctctctgatgtgaaaggagcaatccgatagcag

SEQ ID NO: 123 - DNA, 225 bp, Unknown
  Encodes 16S rRNA from Caulobacter
agagtttgatcatggctcagaacgaacgctggcggcatgcctaacacatgcaagtcgaacgagaccttcgggtctagtggcgcacgggtgcgtaacgcgtgggaatctgcccttgggttcggaataactcgccgaaaggcgtgctaataccggatgatgtcgtaagaccaaagatttatcgcccagggatgagcccgcgtaagattaggtagttggtgaggtaaa

SEQ ID NO: 124 - DNA, 225 bp, Unknown
  Encodes 16S rRNA from Lachnospiracea incertae sedis
agagtttgatcatggctcaggataaacgctggcggcgtgcttaacacatgcaagtcgaacggggttatttcgagtagcttgctacatgaaataacctagtggcggacgggtgagtaacgcgtgggaaacctgcctcgtactgggggataacagttggaaacgactgttaataccgcataagcgcacagtgtcgcatgacacagtgtgaaaaactccggtggtacg

SEQ ID NO: 125 - DNA, 225 bp, Unknown
  Encodes 16S rRNA from Roseburia
agagtttgatcatggctcaggatgaacgctggcggcgtgcctaacacatgcaagtcgagcggacctgattgagtgattagcttgctatgaactcatgactggttagcggcggacgggtgagtaacgcgtgggtaacctgcctcatacagggggatagcagttggaaacgactggtaataccgcataagcgcacagtaccgcatggtacggtgtgaaaaactccgg

SEQ ID NO: 126 - DNA, 225 bp, Unknown
  Encodes 16S rRNA from Clostridium XlVa
agagtttgatcatggctcaggatgaacgctggcggcgtgcctaacacatgcaagtcgaacggagtatcaatgaagcctagcgatttgatacttagtggcggacgggtgagtaacgcgtggataacctgcctcacacattgggataacagttagaaatggctgctaataccgaataagcccacagtgccgcatgacacagggggaaaagattttatcggtgtgaga

SEQ ID NO: 127 - DNA, 225 bp, Unknown
  Encodes 16S rRNA from Acinetobacter
agagtttgatcctggctcagattgaacgctggcggcaggcttaacacatgcaagtcgagcggagataggtagcttgctactgattcttagcggcggacgggtgagtaatgcttaggaatctgcctattagtgggggacaacgtttcgaaagggacgctaataccgcatacgccctacgggggaaagcaggggatcttcggaccttgcgctaatagatgagcctaa

SEQ ID NO: 128 - DNA, 225 bp, Unknown
  Encodes 16S rRNA from Bacteroides
agagtttgatcatggctcaggatgaacgctagctacaggcttaacacatgcaagtcgaggggcagcattaaggaagcttgctttcttagatggcgaccggcgcacgggtgagtaacgcgtatccaacctgccccctacccggggatagccttgcgaaagtaagattaatacccggtgctgttatgattccgcatgggaatataacgaaagattcatcggtagggg

SEQ ID NO: 129 - DNA, 225 bp, Unknown
  Encodes 16S rRNA from Erysipelothrix
agagtttgatcatggctcaggatgaacgctggcggcgtgcttaatacatgcaagtcgaacgcaagcgatcacttcggtggtcaattgagtggcgaacgggtgagtaatacataaggaacctgcccgtctgactgggataacagttggaaacgactgctaataccggataggtaaccttaaggcatcttgaggttattaaagttgagatacacagacggatggcct

SEQ ID NO: 130 - DNA, 225 bp, Unknown
  Encodes 16S rRNA from Coprococcus
agagtttgatcatggctcaggatgaacgctggcggcgtgcctaacacatgcaagtcgaacggggtgtctgatcttcggactggacacttagtggcggacgggtgagtaacgcgtgggtaacctgcctcatacagggggatagcagttggaaacgactgataataccgcataagcgcacagtaccgcatggtacagtgtgaaaaactccggtggtatgagatggac

SEQ ID NO: 131 - DNA, 225 bp, Unknown
  Encodes 16S rRNA from Clostridium XlVa
agagtttgatcctggctcaggatgaacgctggcggcgtgcctaacacatgcaagtcgaacggacccaaggaagagagtagcttgctatgaacttccggaaggttagtggcggacgggtgagtaacgcgtgggcaacctgccctgtactgggggatagcagctggaaacggctggtaataccgcataagcgcacagtaccgcatggtacagtgtgaaaagctccga

SEQ ID NO: 132 - DNA, 198 bp, Unknown
  Encodes 16S rRNA from Bacteroides
agagtttgatcatggctcaggatgaacgctagctacaggcttaacacatgcaagtcgaggggcagcatgaacttagcttgctaagtttgatggcgaccggcgcacgggtgagtaacgcgtatccgaccttccctttgctcggggatagcccagtgaaaactggattaagacccgatgtagtccagcagccgcggtaat

SEQ ID NO: 133 - DNA, 225 bp, Unknown
  Encodes 16S rRNA from Coprococcus
agagtttgatcatggctcaggatgaacgctggcggcgtgcctaacacatgcaagtcgaacggggtgtcatttcttcggagacgacacttagtggcggacgggtgagtaacgcgtgggtaacctgcctcatacagggggatagcagttggaaacgactgataataccgcataagcgcacagtaccgcatggtacagtgtgaaaaactccggtggtatgagatggac

SEQ ID NO: 134 - DNA, 225 bp, Unknown
  Encodes 16S rRNA from Anaerovorax
agagtttgatcctggctcaggatgaacgctggcggcgtgcctaacacatgcaagtcgagcgagaaacttacagatgacgcttcggtcgattcagtaagcggaaagcggcggacgggtgagtaacgcgtaggcaacctgcccttcacacagggatagcctctggaaacggggattaaaacctgataacgcataactgttgcatatcagatatgccaaagatttatc

SEQ ID NO: 135 - DNA, 225 bp, Unknown
  Encodes 16S rRNA from Pseudoflavonifractor
agagtttgatcatggctcaggatgaacgctggcggcgcgcctaacacatgcaagtcgaacggtgaagtcccttcgggggcggatcagtggcggacgggtgagtaacgcgtgagtaacctgcccttacgagcggaataacgtccggaaacagacgctaataccgcatgacacgtgcttccggcatcggaggcacgtcaaagatttatcgcgtaaggatggactcgc

SEQ ID NO: 136 - DNA, 225 bp, Unknown; identical to SEQ ID NO: 135
  Encodes 16S rRNA from Pseudoflavonifractor

SEQ ID NO: 137 - DNA, 225 bp, Unknown
  Encodes 16S rRNA from Prevotella
agagtttgatcatggctcaggatgaacgctagctacaggcttaacacatgcaagtcgaggggcagcatgacgagagcttgctcttgttgatggcgaccggcgcacgggtgcgtaacgcgtatccaaccttccccctgccagggaacagcccgttgaaagacggattaatgccctatgttgtgcgaagatggcatcagatttgcacgaaagattttatcggcatgg

SEQ ID NO: 138 - DNA, 185 bp, Unknown
  Encodes 16S rRNA from Lachnospiracea incertae sedis
agagtttgatcatggctcaggatgaacgctggcggcgtgcctatgcacaatggaggaaactctgatgcagcaacgccgcgtgagtgatgaagtagttcgctacgtaaagctctatcagtagggaagataatgacggtacctacacaagaagctccggctaaatacgtgccagcagccgcggtaat

SEQ ID NO: 139 - DNA, 225 bp, Unknown
  Encodes 16S rRNA from Roseburia
agagtttgatcatggctcaggatgaacgctggcggcgtgcctaacacatgcaagtcgagcggagatgcagaacggaagccttcgggtggaagatctgttatcttagcggcggacgggtgagtaacgcgtgggtaacctggctcatacagggggataacagagagaaatttctgctaataccgcataagcgcacagcatcgcatggtgcagtgtgaaaaactccgg

SEQ ID NO: 140 - DNA, 204 bp, Unknown
  Encodes 16S rRNA from Prevotella
agagtttgatcatggctcaggatgaacgctagctacaggctttggtcaatggatgagaatctgaaccagccaagtagcgtgcaggacgacggccctatgggttgtaaactgcttttgtacggggataaaggagcttacgtgtaagtttttgcaggtaccgtacgaataaggaccggctaattccgtgccagcagccgcggtaat

SEQ ID NO: 141 - DNA, 225 bp, Unknown
  Encodes 16S rRNA from Ruminococcus
agagtttgatcatggctcaggacgaacgctggcggcacgcctaacacatgcaagtcgaacggtagatacttagcttgctttgtatctatagtggcggacgggtgagtaacacgtgagcaacctgcctctgagagagggatagcttctggaaacggatggtaatacctcatgatatagcgttctcgcatgggaatgctatcaaaagaaattcgctcagagatgggc

SEQ ID NO: 142 - DNA, 225 bp, Unknown
  Encodes 16S rRNA from Atopobium
agagtttgatcctggctcaggatgaacgctggcggcgcgcctaacacatgcaagtcgaacgattaagacaccttcgggtgtgtataaagtggcgaacggctgagtaacacgtgggcaacctacccctctctctgggatagcctcgagaaatcgtgggtaataccggatactccggatccatcgcatggtggatccgggaaagctccgacggtgagggatgggccc

SEQ ID NO: 143 - DNA, 225 bp, Unknown
  Encodes 16S rRNA from Eubacterium
agagtttgatcctggctcaggatgaacgctggcggcgtgcttaacacatgcaagtcgaacggaacttattgaatgaagttttcggatggattttgataagtttagtggcggacgggtgagtaacgcgtgggtaacctgccctgtacagggggataacagttagaaatgactgttaataccgcataagaccacagcaccgcatggtgcaggggtaaaagctccgac

SEQ ID NO: 144 - DNA, 225 bp, Unknown
  Encodes 16S rRNA from Robinsoniella
agagtttgatcctggctcaggatgaacgctggcggcgtgcctaacacatgcaagtcgaacggggtgtcagctcttcggaacggacacttagtggcggacgggtgagtaacgcgtgggtaacctgcctcatacagggggatagcagttggaaacgactgataataccgcataagcgcacagtaccgcatggtacagtgtgaaaaactccggtggtatgagatggac

SEQ ID NO: 145 - DNA, 225 bp, Unknown
  Encodes 16S rRNA from Neisseria
agagtttgatcctggctcagattgaacgctggcggcatgctttacacatgcaagtcggacggcagcatcaagaagcttgcttcttggatggcgagtggcgaacgggtgagtaatgcatcggaatgtaccgagtaatgggggataactaatcgaaagattagctaataccgcatacgacctgagggtgaaagcaggggatcttcggaccttgcgttattcgagcag

SEQ ID NO: 146 - DNA, 225 bp, Unknown
  Encodes 16S rRNA from Ruminococcus
agagtttgatcctggctcaggacgaacgctggcggcacgcttaacacatgcaagtcgaacggagataatagcttcggttattaacttagtggcggacgggtgagtaacacgtgagcaacctgccttacagagcggaataatgactggaaacggtcactaataccacataacatatggagatcgcatggtatccatatcaaagatttatcgctgtaagatgggctc

SEQ ID NO: 147 - DNA, 225 bp, Unknown
  Encodes 16S rRNA from Prevotella
agagtttgatcatggctcaggatgaacgctagctacaggcttaacacatgcaagtcgaggggcagcatgcaggaagcttgctttctgtgatggcgaccggcgcacgggtgcgtaacgcgtatccaatctaccctgcacacgggaatagccctgcgaaagtaggattaatgcccgatgttctttttttgttgcatgacagagaaagcaaagatttatcggtacagg

SEQ ID NO: 148 - DNA, 225 bp, Unknown
  Encodes 16S rRNA from Slackia
agagtttgatcatggctcaggatgaacgctggcggcgtgcttaacacatgcaagtcgaacggttaaagcccacttcggtgggtgcataaagtggcgaacgggtgagtaacacgtgaccaacccgccccccgcaccgggataaccggcggaaacgcccgctaataccggatactccgcgacggccgcatggccgacgcgggaaagcccaggcggcgggggatgggg

SEQ ID NO: 149 - DNA, 225 bp, Unknown
  Encodes 16S rRNA from Prevotella
agagtttgatcatggctcaggatgaacgctagctacaggcttaacacatgcaagtcgcggggcatcatgaagggagcttgctctctttgatggcgaccggcgcacgggtgagtaacgcgtatccaacctgccccctagtagggaacagcccgtagaaatgcggattaatgccctatgttctccgaagacggcatcagattcggagcaaaggccttttggttgcta

SEQ ID NO: 150 - DNA, 225 bp, Unknown
  Encodes 16S rRNA from Clostridium XlVa
agagtttgatcctggctcaggatgaacgctggcggcgtgcctaacacatgcaagtcgagcggagttataagagcttgcttttataacttagcggcggatgggtgaggaacgcgtggataacctgcctcacactgggggataacagctggaaacggctgttaataccgcatatgctcacagtaccgcatggtacagggaggaaagatttatcggtgtgagatggat

SEQ ID NO: 151 - DNA, 225 bp, Unknown; identical to SEQ ID NO: 100
  Encodes 16S rRNA from Bacteroides

SEQ ID NO: 152 - DNA, 225 bp, Unknown
  Encodes 16S rRNA from Anaerorhabdus
agagtttgatcatggctcaggatgaacgctggcggcgtgcctaatacatgcaagtcgaacggggtaccttcgggtacctagtggcgaacgggtgagtaacacataaacaatctgccctggagactgggataccgtcgggaaaccgacgctaataccggataggcagtaagggggcatccccatactgttaaagctgggttgcagcgctgcaggatgagtttatgt

SEQ ID NO: 153 - DNA, 225 bp, Unknown
  Encodes 16S rRNA from Bacteroides
agagtttgatcctggctcaggatgaacgctagctacaggcttaacacatgcaagtcgaggggcagcatggaagtagcttgctacttccgatggcgaccggcgaatgggtgagtaacgcgtatccaacctgccgtgtgctcatggatagcccttagaaatgaggattaatacatgatggtctcctttgatcgcctgagattgggagtaaagattcatcggcacacg

SEQ ID NO: 154 - DNA, 225 bp, Unknown
  Encodes 16S rRNA from Prevotella
agagtttgatcctggctcaggatgaacgctagctacaggcttaacacatgcaagtcgaggggcagcatgacggtagcttgctactgttgatggcgaccggcgcacgggtgagtaacgcgtatccaaccttcccacaaataaggaatagcccggtgaaaatcgaattaataccttatgtggtcataagaggacatctgattatgattaaagatttatcgtttgtgg

SEQ ID NO: 155 - DNA, 225 bp, Unknown
  Encodes 16S rRNA from Corynebacterium
agagtttgatcctggctcaggacgaacgctggcggcgtgcttaacacatgcaagtcgaacggtaaggctccagcttgctggggtacacgagtggcgaacgggtgagtaacacgtgggtgacctgccctgcacttcgggataagcctgggaaactgggtctaataccggataggactgcaccgtgagggtgtggtggaaagttttttcggtgtgggatgggcccgc

SEQ ID NO: 156 - DNA, 225 bp, Unknown
  Encodes 16S rRNA from Atopobium
agagtttgatcctggctcaggatgaacgctggcggcgcgcttaacacatgcaagtcgaacggttaaagccccttcgggggtgtataaagtggcgaacggctgagtaacacgtgggcaacctacccccctctttgggatagcctcgggaaaccgggaataataccgaatactccggacacaccgcatgatgtgaccgggaaagctccggcggagagggatgggccc

SEQ ID NO: 157 - DNA, 225 bp, Unknown
  Encodes 16S rRNA from unknown taxa
agagtttgatcctggctcaggatgaacgctggcggcatgcttaacacatgcaagtcgaacgggaagtggtgtttccagtggcgaacgggtgagtaacgcgtaagaacctgcccttgggaggggaacaacaactggaaacggttgctaataccccgtaggctgaggagcaaaaggagaaatccgcccaaggaggggctcgcgtctgattagctagttggtgaggca

SEQ ID NO: 158 - DNA, 225 bp, Unknown
  Encodes 16S rRNA from Prevotella
agagtttgatcatggctcaggatgaacgctagctacaggcttaacacatgcaagtcgcggggcagcatggaggttgcttgcaacctctgatggcgaccggcgcacgggtgagtaacgcgtatccaacctgccctgcggtagggaacagcccggcgaaagtcggattaatgccctatgtgctcatttgaaggcatctgattttgagcaaaggatttattcgccaca

SEQ ID NO: 159 - DNA, 225 bp, Unknown
  Encodes 16S rRNA from Roseburia
agagtttgatcatggctcaggatgaacgctggcggcgtgcctaacacatgcaagtcgaacgagagaggaaggtgcttgcaccgaccaatcgagtggcggacgggtgagtaacgcgtgggtaacctgcctcatacagggggataacaactggaaacggttgataataccgcataagcgcacagcatcgcatgatgcagtgtgaaaaactccggtggtatgagatgg

SEQ ID NO: 160 - DNA, 225 bp, Unknown
  Encodes 16S rRNA from Prevotella
agagtttgatcctggctcaggatgaacgctagctacaggcttaacacatgcaagtcgcggggcagcatggaggttgcttgcaacctctgatggcgaccggcgcacgggtgcgtaacgcgtatccaacctgccccttactctggaatagcccggcgaaagtcggattaatgccggatgttgtcagacgaggacatctgaatctgaccaaaggcccgaaagggttgg

SEQ ID NO: 161 - DNA, 225 bp, Unknown
  Encodes 16S rRNA from Prevotella
agagtttgatcctggctcaggatgaacgctagctacaggcttaacacatgcaagtcgaggggtagcgtgagagaagcttgcttctcttgacgacgaccggcgaatgggtgagtaacgcgtatccaacctgcccttatctcaaggatagcccttagaaatgaggattaaaacttgatagtttccattgaccgcatgggtgatggaataaagatttattggataagg

SEQ ID NO: 162 - DNA, 225 bp, Unknown
  Encodes 16S rRNA from Eubacterium
agagtttgatcctggctcaggattaacgctggcggcgtgcctaacacatgcaagtcgagcgagaaatagtgaagagatacttcggttgaacagatctatggacagcggcggacgggtgagtaacgcgtgggcaacctgcccctttccggaggatagccaagggaaactttgaataatactccataaagcagagatgtcgcatggcaattctgccaaagatttatc

SEQ ID NO: 163 - DNA, 225 bp, Unknown
  Encodes 16S rRNA from Rhodocista
agagtttgatcatggctcagaacgaacgctggcggcaggcttaacacatgcaagttgaacggtatgttgagtgcttgcacttagcagagagtagcgcactggtgagtaacacgtgggaacatgccctaaagtacgggatagcgtctggaaacggacgataatacggtatacgccctgagggggaaagatttatcgctttaggattggcccgcggcagattaggta

SEQ ID NO: 164 - DNA, 225 bp, Unknown
  Encodes 16S rRNA from Prevotella
agagtttgatcatggctcaggatgaacgctagctacaggcttaacacatgcaagtcgaggggtaacatgattggagcttgctccgattgatgacgaccggcgcacgggtgcgtaacgcgtatccaaccttccccctaccagggaatagcccgttgaaagacggattaatgccctatgttgtgtgataatggcatcagagttacacgaaagactttgtcggtatgg

SEQ ID NO: 165 - DNA, 225 bp, Unknown
  Encodes 16S rRNA from Clostridium XlVa
agagtttgatcctggctcaggatgaacgctggcggcgtgcctaacacatgcaagtcgaacggagctgcgacgctgaggagtggagtacttgtacaaagcgaatcttgtcgtagcttagtggcggacgggtgagtaacgtgtggataacctggtccatccagggggatagcagctggaaacggctggtaataccgcataagcgcacagtagggcatcctacggtgt

SEQ ID NO: 166 - DNA, 225 bp, Unknown
  Encodes 16S rRNA from Prevotella
agagtttgatcctggctcaggatgaacgctagctacaggcttaacacatgcaagtcgaggggcagcatgtcgtgtgcttgcacacgatgatggcgaccggcgcacgggtgagtaacgcgtatccaacctgcccatgactccgggatagcccgctgaaaagcggattaacaccggatgcggtcgaacgaggacatctgatttcgaccaaagcttcggcggtcatgg

SEQ ID NO: 167 - DNA, 225 bp, Unknown
  Encodes 16S rRNA from Prevotella
agagtttgatcctggctcaggatgaacgctagctacaggcttaacacatgcaagtcgaggggcagcatgtcgtgtgcttgcacacgatgatggcgaccggcgcacgggtgagtaacgcgtatccaacctgcccatgaccccgggatagcccgctgaaaagcggattaacaccggatggggtcgaacgaggacatctgatttcgaccaaagcttcggcggtcatgg

SEQ ID NO: 168 - DNA, 225 bp, Unknown
  Encodes 16S rRNA from unknown taxa
agagtttgatcatggctcaggatgaacgctggcggcatgccttacacatgcaagtcggacgggaagtggtgtttccagtggcggacgggtgagtaacgcgtaagaacctacccttgggaggggaacaacagctggaaacggctgctaataccccgtaggctgaggagcaaaaggaggaatccgcccgaggaggggctcgcgtctgattagctagttggtgaggca

SEQ ID NO: 169 - DNA, 225 bp, Unknown
  Encodes 16S rRNA from Ochrobactrum
agagtttgatcatggctcagaacgaacgctgtcgacatgctttacacatgcaagtcttacgggtataacttgttataccagtggcaaacgggtgagtaatacgtagaaatgtacccaatagtcttgaataacaattggaaacgattgataatacaagatattatggtaacataaaaggtttagtaataaactgctattggagcagtctacggtggattagattgt

SEQ ID NO: 170 - DNA, 225 bp, Unknown
  Encodes 16S rRNA from Mogibacterium
agagtttgatcatggctcaggatgaacgctggcggcgtgcctaatacatgcaagtcgagcgagaatctcctttgaagcgttttcggacaattctgtggagaggaaagcggcggacgggtgagtaacgcgtaggcaacctgcccttagcagagggatagccattggaaacgatgattaaaacctcataatgctgaagagtcacatgtctcttcagccaaagattta

SEQ ID NO: 171 - DNA, 225 bp, Unknown
  Encodes 16S rRNA from Adlercreutzia
agagtttgatcctggctcaggatgaacgctggcggcgtgcttaacacatgcaagtcgaacggttaaaccgccttcgggcggacatagagtggcgaacgggtgagtaacacgtgaccaacctgccccgcgcaccgggacagccccccgaaagggggattaataccggatactccggcggccccgcatggggcggccgggaaggctccggcggcgcgggatggggtc

SEQ ID NO: 172 - DNA, 225 bp, Unknown
  Encodes 16S rRNA from Prevotella
agagtttgatcctggctcaggatgaacgctagctacaggcttaacacatgcaagtcgaggggtaacgtgagagaagcttgcttctcttgacgacgaccggcgaatgggtgagtaacgcgtatccaacctgccgcacgcccgggaacagcccttggaaacgaggattaaatcccgataccttgtgagctcgcatgagcatacaagaaaacaggcatgcgatgggga

SEQ ID NO: 173 - DNA, 225 bp, Unknown
  Encodes 16S rRNA from Riemerella
agagtttgatcctggctcaggatgaacgctagcgggaggcctaacacatgcaagccgagcggtagaaagtagcttgctacttttgagagcggcgtacgggtgcgtaacacgtgtgcaacctgcctttatctggggaatagcctttcgaaaggaagattaatgctccataacatattgaatggcatcatttaatattgaaagctccggcggatagagatgggcacg

SEQ ID NO: 174 - DNA, 225 bp, Unknown
  Encodes 16S rRNA from Prevotella
agagtttgatcctggctcaggatgaacgctagctacaggcttaacacatgcaagtcgaggggtaacaggagggaagcttgctttcctcgctgacgaccggcgaatgggtgagtaacgcgtatccaacctgccgcacgcccgggaacagcccttggaaacgaggattaaatcccgataccttgcccttccgcatgaaggggcaagaaaacaggcatgcgatgggga

SEQ ID NO: 175 - DNA, 225 bp, Unknown
  Encodes 16S rRNA from Roseburia
agagtttgatcatggctcaggatgaacgctggcggcgtgcttaacacatgcaagtcgaacgaggtttgagcggaagcccttcgggacggaagcttttaccgagtggcggacgggtgagtaacgcgtgggtaacctgccctgtactgggggacaacagttggaaacgactgctaataccgcataagcgcacgggatcgcatggtcttgtgtgaaaaactccggtgg

SEQ ID NO: 176 - DNA, 225 bp, Unknown
  Encodes 16S rRNA from Slackia
agagtttgatcctggctcaggatgaacgctggcggcgcgcctaacacatgcaagtcgaacggtgatactttcttcggaaagaggatcagtggcgaacgggtgagtaacgcgtgggtaacctgcccttgacacagggatagcaaagggaaacttttggtaatacctgatgacctcaaaaagtgacatctctttttgagcaaagaatttcggtcgaggatggacccg

SEQ ID NO: 177 - DNA, 225 bp, Unknown
  Encodes 16S rRNA from Clostridium IV
agagtttgatcatggctcaggacgaacgctggcggcgtgcctaacacatgcaagtcgaacggagttattagagtgaagttttcggatggaatgataataacttagtggcggacgggtgagtaacgcgtgagtaacctgcccatgagagggggataacgttctgaaaagaacgctaataccgcataacatatttagttcgcatggactgaatatcaaaggagcgat

SEQ ID NO: 178 - DNA, 225 bp, Unknown
  Encodes 16S rRNA from Syntrophococcus
agagtttgatcatggctcaggatgaacgctggcggcgtgcctaacacatgcaagtcgagcggaaccataaagaagcttgctttttaatggtttagcggcggatgggtgaggaacgcgtgggcaacctgcccttcacagggggataacagctggaaacggctgttaataccgcatatgctcacgatgccgcatggcattgggaggaaaactccggtggtgaaggat

SEQ ID NO: 179 - DNA, 225 bp, Unknown
  Encodes 16S rRNA from Prevotella
agagtttgatcctggctcaggatgaacgctagctacaggcttaacacatgcaagtcgaggggtaacgtgagagaagcttgcttctcttgacgacgaccggcgaatgggtgagtaacgcgtatccaacctgccgcacgcccgggaacagcccttggaaacgaggattaaatcccgataccttatcgttccgcatggagtgataagaaaacaggcatgcgatgggga

SEQ ID NO: 180 - DNA, 225 bp, Unknown
  Encodes 16S rRNA from Treponema
agagtttgatcatggctcagaatgaacgctggcggcgggtcttaagcatgcaagtcggacggcaagggagtgcttgcactcccctagagtggcggactggtgaggaacacgttggtgacgtaccctttggatggggatagccggtagaaataccgggtaataccgaataaggtcggtggtctcggaagccaccgaggaaagcagcttcggctgcgccgaaggaac

SEQ ID NO: 181 - DNA, 225 bp, Unknown
  Encodes 16S rRNA from Prevotella
agagtttgatcatggctcaggatgaacgctagctacaggcttaacacatgcaagtcgcggggcagcatgttgtgtgcttgcacacaatgatggcgaccggcgcacgggtgcgtaacgcgtatccaacctgccccttactctggaatagcccggcgaaagtcggattaatgccggatgttgtcagatgaggacatctgagtttgaccaaaggcttctgccggtaag

SEQ ID NO: 182 - DNA, 225 bp, Unknown
  Encodes 16S rRNA from Anaerovorax
agagtttgatcctggctcaggatgaacgctggcggcgtgcctaacacatgcaagtcgagcgagaaacctttgattgacgcttcggttgatttcaaaggcggaaagcggcggacgggtgagtaacgcgtaggcaacctgccccttgcagagggatagcctcgggaaaccgggattaaaacctcataatgctgatcctacacatgtttgatcagccaaagatttatc

SEQ ID NO: 183 - DNA, 225 bp, Unknown
  Encodes 16S rRNA from Prevotella
agagtttgatcctggctcaggatgaacgctagctacaggcttaacacatgcaagtcgaggggcagcatgaatcaagcttgcttgatttgatggcgaccggcgcacgggtgcgtaacgcgtgtccaacctacccaccgctcagggatagcccatcgaaagatgaattaatacctgatgttgtatgggaatcacatggcttccatactaaagatttatcggcgatgg

SEQ ID NO: 184 - DNA, 225 bp, Unknown
  Encodes 16S rRNA from Methanobrevibacter
agagtttgatcatggcagaagctactgctattgggattcgattaagccatgcaagtcgaacgaatttagattcgtggcgtacggctcagtaacacgtggataacctacccttaggaccgggataaccctgggaaactggggctaatactggatagatgatttttcctggaatggttttttgtttaaatgttttttcgcctaaggatgggtctgcggcagattagg

SEQ ID NO: 185 - DNA, 225 bp, Unknown
  Encodes 16S rRNA from Corynebacterium
agagtttgatcatggctcaggacgaacgctggcggcgtgcttaacacatgcaagtcgaacggaaaggccctgcttgcagggtactcgagtggcgaacgggtgagtaacacgtgggtgatctgccctgcacttcgggataagcctgggaaactgggtctaataccggataggaccatcgtttagtgtcggtggtggaaagtttttcggtgcaggatgagctcgcgg

SEQ ID NO: 186 - DNA, 225 bp, Unknown
  Encodes 16S rRNA from Clostridium XlVa
agagtttgatcatggctcaggatgaacgctggcggcgcgcctaacacatgcaagtcgaacggagcatcattaatgagactttcgggtggatttgatgatgacttagtggcggacgggtgagtaacgcgtggggaacctgccctgtacagggggacaacagccggaaacagctgctaataccgcataagcgcacagtgccgcatggtacagtgtgaaaagccgaga

SEQ ID NO: 187 - DNA, 166 bp, Unknown
  Encodes 16S rRNA from Alkaliphilus
agagtttgatcatggctcaggatgaacgctggcggcgtgcctaacacatgcaagtcgagcgagaatcagggaaatgaagcttcggtagattggaactgaggacagcggcggacgggtgagtaacgcgtgggcaacctgccccttactggtggatagccgcggtaat

SEQ ID NO: 188 - DNA, 225 bp, Unknown
  Encodes 16S rRNA from Ruminococcus
agagtttgatcatggctcaggacgaacgctggcggcacgcctaacacatgcaagtcgaacggacgagaaggagcttgcttcttcaagttagtggcggacgggtgagtaacacgtgagcaacctgcctttaagagagggatagcttctggaaacggatggtaatacctcataacacatcgggaccgcatgattctgatgtcaaagatttatcgcttaaagatgggc

SEQ ID NO: 189 - DNA, 225 bp, Unknown
  Encodes 16S rRNA from Clostridium XlVa
agagtttgatcatggctcaggatgaacgctggcggcgtgcttaacacatgcaagtcgaacggaacttattgaatgaagttttcggatggattttgataagtttagtggcggacgggtgagtaacgcgtgggtaacctgccctgtacagggggataacagttagaaatgactgttaataccgcataagaccacagtgccgcatggcacaggggtaaaagctgcgac

SEQ ID NO: 190 - DNA, 225 bp, Unknown
  Encodes 16S rRNA from Eubacterium
agagtttgatcatggctcaggatgaacgctggcggcgtgcctaacacatgcaagtcgagcgagaagagaatgacctattcttcggatgaagccattctcggacagcggcggacgggtgagtaacacgtaggaaacctgccctttactgggggatagccgagggaaacttcgagtaataccccataacgcgttatgatcgcatgatcgaaacgccaaagatttatc

SEQ ID NO: 191 - DNA, 225 bp, Unknown
  Encodes 16S rRNA from Bacteroides
agagtttgatcctggctcaggatgaacgctagctacaggcttaacacatgcaagtcgaggggcagcatgaacttagcttgctaagtttgatggcgaccggcgcacgggtgagtaacacgtatccaacctgcccatgactcagggatagccctctgaaaggaggattaatacctgatgcggttgactggggacatcccctttcaaccaaagattcatcggtcatgg

SEQ ID NO: 192 - DNA, 225 bp, Unknown
  Encodes 16S rRNA from Roseburia
agagtttgatcctggctcaggatgaacgctggcggcgtgcctaacacatgcaagtcgaacggacccatggaaaagattagcttgctatgattttccggaaggttagtggcggacgggtgagtaacgcgtgggtaacctgcctcatacagggggatagcagttggaaacgactggtaataccgcataagcgcacagtaccgcatggtacagtgtgaaaaactccgg

SEQ ID NO: 193 - DNA, 225 bp, Unknown
  Encodes 16S rRNA from Lentisphaera
agagtttgatcctggctcagaatgaacgctggcggcatggattaggcatgcaagtcgaacgagaaagcccgcaagggcgagtaaagtggcgaaagggtgagtaacacgtgagcaacctgcccccgagaccggaacaagcctgggaaaccgggtctgaaaccggatgaggaccgggaaggcatcttcccgcctccaaacattcatggctcggggatgggctcgcgg

SEQ ID NO: 194 - DNA, 225 bp, Unknown
  Encodes 16S rRNA from Eubacterium
agagtttgatcctggctcaggattaacgctggcggcgtgcctaacacatgcaagtcgagcgagaattaaatgaatgattcttcggatgaattcgtttaaggacagcggcggacgggtgagtaacgcgtgggcaacctgcccctttccggaggatagccaagggaaactttgaataatactccataaagcatttttgccgcatgacagagatgccaaagatttatc

SEQ ID NO: 195 - DNA, 225 bp, Unknown
  Encodes 16S rRNA from Roseburia
agagtttgatcatggctcaggatgaacgctggcggcgtgcctaacacatgcaagtcgagcggaccttagagagtgaacagcttgctgggatctttcgaaaggttagcggcggacgggtgagtaacgcgtgggtaacctgcctcatacagggggatagcagttggaaacgactggtaataccgcataagcgcacagtaccgcatggtacggtgtgaaaaactccgg

SEQ ID NO: 196 - DNA, 225 bp, Unknown
  Encodes 16S rRNA from Clostridium IV
agagtttgatcatggctcaggatgaacgctggcggcatgcctaacacatgcaagtcgaacggagttattagacggaagccttcgggtggaagattaataacttagtggcggacgggtgagtaacgcgtgagtaacctgcctctcagagggggataacgttctgaaaagaacgctaataccgcatataatcaagaaaccgcatgattttttgatgaaaggagcaat

SEQ ID NO: 197 - DNA, 215 bp, Unknown
  Encodes 16S rRNA from Hahella
agagtttgatcatggctcaggatgaacgctagctacaggcttaacacatgcaagtcgaggggaaaccctgatgcagccatgccgcgtgtgtgaagaaggccttcgggttgtaaagcacttttgcattcgaggaagacagcgtataaataaatgcgctatttgacgttagagtgtgaataagcaccggcaaactccgtgccagcagccgcggtaat

SEQ ID NO: 198 - DNA, 225 bp, Unknown
  Encodes 16S rRNA from Butyricicoccus
agagtttgatcatggctcaggataaacgctggcggcgtgcataacacattcaagtcgaacggacgatacgagaaacttcggttttttgtaaagttagtggcggacgggtgagtaacgcgtgagcaatctgcctttgatagagggataacacatggaaacgtgtgctaataccgcataacgttaaagaaccgcatgattctttaaccaaagctccggcgatcaaag

SEQ ID NO: 199 - DNA, 225 bp, Unknown
  Encodes 16S rRNA from Clostridium IV
agagtttgatcatggctcaggacgaacgctggcggcgtgcctaacacatgcaagtcgagcggacttgtatttggaaagtgcttgcaccggaagaatacaagttagcggcggacgggtgagtaacgcgtgagcaacctgtcctctacagggggataagatctcgaaagggattctaataccgcatgagaccacagcagggcatcctgcgggggtcaaaggaggaat

SEQ ID NO: 200 - DNA, 225 bp, Unknown
  Encodes 16S rRNA from Prevotella
agagtttgatcatggctcaggatgaacgctagctacaggcttaacacatgcaagtcgcggggcagcatgggagttgcttgcaatttccgatggcgaccggcgcacgggtgcgtaacgcgtatccaacctacccgcaagtcagggccagcccggcgaaagtcggattaatccctgatgtggtgcgaagaggacatctgattcacattaaaggagcgatttgcttgc

SEQ ID NO: 201 - DNA, 225 bp, Unknown
  Encodes 16S rRNA from Clostridium IV
agagtttgatcatggcttaggatgaacgctggcggcgtgcataacacattcaagtcgaacggtgaagggacttcggtcccggatcagtggcggacgggtgagtaacgcgtgagcaacctgccctgcagtgcgggataacagagggaaacttctgctaataccgcatatagcatcggaaccgcatgattccggtatgaaagatttattgctgcaggatgggctcgc

SEQ ID NO: 202 - DNA, 225 bp, Unknown
  Encodes 16S rRNA from Desulfovibrio
agagtttgatcctggctcagattgaacgctggcggcgtgcttaacacatgcaagtcgaacgcgaaaggggcttcggccccgagtagagtggcgcacgggtgagtaacgcgtggataatctgcccctgcaactggaatagcgactggaaacggtcgataataccggatacgcccttgtcttacaatgaggggaaaggagacctctgcttgcaagtttccgtgcagg

SEQ ID NO: 203 - DNA, 225 bp, Unknown
  Encodes 16S rRNA from Sphingobacterium
agagtttgatcatggctcaggatgaacgctagcggcaggcctaatacatgcaagtcgaacgggatctatgagtaagcttgcttacttttagtgagagtggcgcacgggtgcgtaacgcgtgagcaacctacccatatcagggggatagcccggagaaatccggattaacaccgcatgacacagcaattcggcatcgaatcactgttaaatatttataggatatgg

SEQ ID NO: 204 - DNA, 225 bp, Unknown
  Encodes 16S rRNA from Roseburia
agagtttgatcctggctcaggatgaacgctggcggcgtgcctaacacatgcaagtcgagcggacctgattaagtgaatagcttgctatgaacttatgactggttagcggcggacgggtgagtaacgcgtgggtaacctgcctcatacagggggatagcagttggaaacgactggtaataccgcataagcgcacagtaccgcatggtacagtgtgaaaaactccgg

SEQ ID NO: 205 - DNA, 225 bp, Unknown
  Encodes 16S rRNA from Bacteroides
agagtttgatcctggctcaggatgaacgctagcgacaggcctaacacatgcaagtcgaggggcagcatgagagtagcaatacttttgatggcgaccggcgcacgggtgcgtaacaggtgtgcaatctgtccataatcggggaatagcccgccgaaaggtgaattaacgctccatgtgtaatgaagaggcatctctttattatgaaacgtaaggattatgggtgag

SEQ ID NO: 206 - DNA, 225 bp, Unknown
  Encodes 16S rRNA from Ruminococcus
agagtttgatcatggctcaggacgaacgctggcggcacgcctaacacatgcaagtcgaacggtgtttatcagcttgctggtaaacatagtggcggacgggtgagtaacacgtgagcaacctgccttcaagagagggatagcttctggaaacggatggtaataccttataatatatactggccgcatgaccggtatatcaaacgaattttgcttgaagatgggctc

SEQ ID NO: 207 - DNA, 225 bp, Unknown
  Encodes 16S rRNA from Prevotella
agagtttgatcatggctcaggatgaacgctagcggcaggcttaacacatgcaagtcgaggggcatcgggtccagcaatggatgccggcgaccggcgaaagggtgagtaacgcgtgagcaacgtgcccgtctgagggggatagtcattggaaacgatgcgtaataccccgtaacaacagtcaccgcatggtgggtgtttgaaagatttattgcagacggatcggct

SEQ ID NO: 208 - DNA, 225 bp, Unknown
  Encodes 16S rRNA from Asteroleplasma
agagtttgatcctggctcaggataaacgccggcggcgtgcctaatacatgcaagtcgaacgaggctcttcggagccgagtggcgtacgggtgagtaacacgttggtaacctgccctccagaccggaataccagagagaaatctctgctaatgccggatgacgtcatatggtcgcaagaccacttgaccaaaggcggcaactgccgcgctgaaggatggacctgcg

SEQ ID NO: 209 - DNA, 225 bp, Unknown
  Encodes 16S rRNA from Syntrophococcus
agagtttgatcatggctcaggatgaacgctggcggcgtgcctaacacatgcaagtcgagcggacttatgatgagattcttcggatgatttttataagttagcggcggatgggtgaggaacgcgtggagaacctgcccttcacagggggataacagttggaaacgactgttaataccgcatatgctcacgcgaccgcatggtcgagtgaggaaagctccggcggtg

SEQ ID NO: 210 - DNA, 225 bp, Unknown
  Encodes 16S rRNA from Victivallis
agagtttgatcatggctcagaatgaacgctggcggcatggattaggcatgcaagtcgaacgccccggtccctcgggtccggggagtggcgaaagggtgcgcaacgcgtggggaacccgcccccgggcccgggacaagcgctggaaacggcgtctaataccggatggaggggccgccggcatcggcggctgccgaaagtcttctcgcccggggagggccccgcgtc

SEQ ID NO: 211 - DNA, 225 bp, Unknown
  Encodes 16S rRNA from Lachnobacterium
agagtttgatcctggctcaggatgaacgctggcggcgtgcttaacacatgcaagtcgaacgaagcacctggtcacgatcccttcggggtgacgaccttgtgactgagtggcggacgggtgagtaacgcgtgggaaacctgccatgtactgggggataacagttggaaacggctgctaataccgcataacactgttggatcgcatgatccgatagccaaaactccg

SEQ ID NO: 212 - DNA, 225 bp, Unknown
  Encodes 16S rRNA from Lachnospiracea incertae sedis
agagtttgatcatggctcaggatgaacgctggcggcgtgcttaacacatgcaagtcgaacgaagctcttacgacagatctcttcggagtgaagatgtttgagactgagtggcggacgggtgagtaacgcgtgggtaacctgcctcatagagggggacaacagttggaaacgactgctaataccgcatagtaagaaagaaccgcatgattttttcttgaaagcttt

SEQ ID NO: 213 - DNA, 225 bp, Unknown
  Encodes 16S rRNA from Clostridium IV
agagtttgatcatggctcaggatgaacgctggcggcgtgcataacacattcaagtcgaacggacgccttcgggcgccagtggcggacgggtgagtaacgcgtgaggaacctgccgcggattggggaataacgaccggaaacagtcgctaataccgcataacgcacagaggccgcatgacctttgtgccaaagatttatcgatccgcgatggactcgcgtccaatt

SEQ ID NO: 214 - DNA, 225 bp, Unknown
  Encodes 16S rRNA from Anaerorhabdus
agagtttgatcctggctcaggataaacgctggcggcgtgcctaatacatgcaagtcggacgaggattgagacttcggttttaatccgagtggcgaacgggtgagtaaaacgtaagcaacctgcctacaaggaccgggataacacctggaaacgggcgctaaaaccggataggcaataagggggcatcctcatattgttaaaggtgagaaacacaagtagatgggc

SEQ ID NO: 215 - DNA, 225 bp, Unknown
  Encodes 16S rRNA from Altererythrobacter
agagtttgatcatggctcagaacgaacgctggcggcatgcttaacacatgcaagtcgaacggtgttttctagtacttgtattaggaaacatagtggcaaacgggtgagtaacgcgtgggaatgtaccctttggtattgaataacgtctggaaacggacgctaatacaatataagctcgagagaggaaagagaaatcgctgaaggagtagcccgcgttagattagg

SEQ ID NO: 216 - DNA, 225 bp, Unknown
  Encodes 16S rRNA from Clostridium XlVa
agagtttgatcatggctcaggatgaacgctggcggcgtgcctaacacatgcaagtcgaacggagaaagatgcttcggtatctttcttagtggcggacgggtgagtaacgcgtgggtaacctgccccatacaggggaacaacagctggaaacggctgctaataccgcataagcgcacggtaccgcatggtacagtgtgaaaagattgtatcggtatgggatggacc

SEQ ID NO: 217 - DNA, 225 bp, Unknown
  Encodes 16S rRNA from Clostridium XlVa
agagtttgatcctggctcaggatgaacgctggcggcgtgcctaacacatgcaagtcgaacggaacttttattaatggagattcgtcaaagttgatttaagtttagtggcggacgggtgagtaacgcgtgggtaacctgcctcatagagggggataacggctggaaacgaccgctaataccgcataagcccacagtaccgcatggtacagggggaaaagatttatc

SEQ ID NO: 218 - DNA, 225 bp, Unknown
  Encodes 16S rRNA from Proteiniclasticum
agagtttgatcatggctcaggacgaacgctggcggtatgcctaacacatgcaagtcgaacgaaaaacgagggcttgctctcgtttttagtggcgcacgggtgagtaacgcgtgagtaatctgccttaaagtgggggacaacatttggaaacgaatgctaataccgcgtaatatacagttttcgcatggattttgtattatagatttatcgctttaagatgagctc

SEQ ID NO: 219 - DNA, 225 bp, Unknown
  Encodes 16S rRNA from Bifidobacterium
agagtttgatcctggctcaggacgaacgctggcggcgtgcttaacacatgcaagtcgaacgggatcctgcaagcttgcttgcgggtgagagtggcgaacgggtgagtaatgcgtgaccaacctgccccattctccggaatagctcctggaaacgggtggtaatgccggatgctccgccccctcgcatggggggtcgggaaggcttttgcggaatgggatggggtc

SEQ ID NO: 220 - DNA, 225 bp, Unknown
  Encodes 16S rRNA from Clostridium XlVa
agagtttgatcctggctcaggatgaacgctggcggcgtgcctaacacatgcaagtcgagcggagtgaatcgagtgcttgcacatgattcacttagcggcggatgggtgaggaacgcgtggagaacctgcctcacacagggggataacagttggaaacgactgttaataccgcatatgctcacggtaccgcatggtacagggaggaaagatttatcggtgtgagat

SEQ ID NO: 221 - DNA, 225 bp, Unknown
  Encodes 16S rRNA from Clostridium XlVa
agagtttgatcctggctcaggatgaacgctggcggcgtgcctaacacatgcaagtcgaacgaagttgtttccacccgacagattatcttcggatatgaagtcaccggaaacgcttagtggcggacgggtgagtaacgcgtgggcaacctgccctacacagggggatagcggttggaaacgaccggtaataccgcatacctttattttgccgcatgacagaataaa

SEQ ID NO: 222 - DNA, 225 bp, Unknown
  Encodes 16S rRNA from Desulfovibrio
agagtttgatcatggctcaggacaaacgctggcggcgtgcctaacacatgcaagtcgaacgagcccttcggggctagtggcagacgggtgagtaacgcgtaggtaatgtacctcttcgctggggataccgttccgaaaggaacgttaataccgaatgaattcatcgggcggcatcgcttgatgaataaaccgcaagggcgaggagatcagcttgcgtactatcag

SEQ ID NO: 223 - DNA, 225 bp, Unknown
  Encodes 16S rRNA from Clostridium XlVa
agagtttgatcatggctcaggatgaacgctggcggcgtgcctaacacatgcaagtcgaacggcggatgcatttcggtgtatctgcagtggcggacgggtgagtaacgcgtgggtaatctgccctgtacaggggaatagcagttggaaacgactgataaaaccgcataagcacacaggaccgcatggtcccgggtgaaaaactccggtggtacaggatgagcccgc

SEQ ID NO: 224 - DNA, 225 bp, Unknown
  Encodes 16S rRNA from Nitrobacter
agagtttgatcatggctcagagcgaacgctagcggaatgctttatacatgcaagtcgaacgaatgagtttatattgagtagcaatacgatttataaatgagttagtggcgaacgggtgagtaatagataggaacttgccgagtagtgggggacaacagatagaaatgtctgctaataccgcatacgcccgagaggggaaagatttatcgctatttgagaggccta

SEQ ID NO: 225 - DNA, 225 bp, Unknown
  Encodes 16S rRNA from Enterorhabdus
agagtttgatcctggctcaggatgaacgctggcggcgtgcttaacacatgcaagtcgaacggttaaaccggcttcggccggacatacagtggcgaacgggtgagtaacacgtgaccaacctgccccgcgctccgggacagccccccgaaagggggattaataccgggtactccgggaggggcgcatgccccgcccgggaaagcccaggcggcgcgggatggggtc

SEQ ID NO: 226 - DNA, 225 bp, Unknown
  Encodes 16S rRNA from Clostridium sensu stricto
agagtttgatcctggctcaggacgaacgctggcggcgtgcttaacacatgcaagtcgagcggggataatgagacggaaggcttcggccggaagacttattattctagcggcggacgggtgagtaacgcgtgaatgatctgtctcttacagggggataacacttggaaacaggtgctaataccgcataagaccacggggctgcatggccttgaggtaaaaggagcg

SEQ ID NO: 227 - DNA, 225 bp, Unknown
  Encodes 16S rRNA from Oscillibacter
agagtttgatcctggctcaggacgaacgctggcggcgtgcctaacacatgcaagtcgaacgggacttattggaatgagacttcggtcaaaggaaaataagtttagtggcggacgggtgagtaacgcgtgagcaacctgcctttcagagggggacaacagttggaaacgactgctaataccgcataacgtacagaggaggcatcttccctgtaccaaagatttatc

SEQ ID NO: 228 - DNA, 225 bp, Unknown
  Encodes 16S rRNA from Nautilia
agagtttgatcatggctcagagttaacgctggcggcgtgcctaacacatgcaagtcgagcgaattcttacagagtatcgtaagagttagcggcaaacgggtgagtaacacatgggaaacctcccttagaatggggaatatctccgtgaaaacggagctaataccgcataagaccacagtttggcatcaaacaggggtaaaagcagcaatgcgttctaagatggtc

SEQ ID NO: 229 - DNA, 225 bp, Unknown
  Encodes 16S rRNA from Corynebacterium
agagtttgatcctggctcaggacgaacgctggcggcgtgcttaacacatgcaagtcgaacggaaaggccctgcttgcagggtactcgagtggcgaacgggtgagtaacacgtgggtgatctgccctgcacttcgggataagcctgggaaactgggtctaataccggataggaccatcgtttagtgtcggtggtggaaagtttttcggtgcaggatgagctcgcgg

SEQ ID NO: 230 - DNA, 225 bp, Unknown
  Encodes 16S rRNA from Ruminococcus
agagtttgatcatggctcaggacgaacgctggcggcacgcctaacacatgcaagtcgagcggtgaattttggatttattcgagattcatagcggcggacgggtgagtaacacgtgagcaacctacctctaagtgagggatagcttctggaaacggatggtaataccttataatatatatttatcacatgatagatatatcaaagatttattgcttagagatgggc

SEQ ID NO: 231 - DNA, 225 bp, Unknown
  Encodes 16S rRNA from Coprococcus
agagtttgatcctggctcaggatgaacgctggcggcgtgcctaacacatgcaagtcgaacgaagtgtcatttcttcggaggtaacacttagtggcggacgggtgagtaacgcgtgggtaacctgcctcatacagggggatagcagttggaaacgactgataataccgcataagcgcacagcatcgcatggtgcagtgtgaaaaactccggtggtatgagatggac

SEQ ID NO: 232 - DNA, 225 bp, Unknown
  Encodes 16S rRNA from Eubacterium
agagtttgatcatggctcaggattaacgctggcggcgtgcctaacacatgcaagtcgagcgagaaatagtgaagagattcttcggatgaacagatctatggacagcggcggacgggtgagtaacgcgtgggcaacctgcccctttccggaggatagccaagggaaactttgaataatactccataaagcagagatgtcgcatggcaattctgccaaagatttatc

SEQ ID NO: 233 - DNA, 225 bp, Unknown
  Encodes 16S rRNA from Rikenella
agagtttgatcctggctcaggatgaacgctagcggcaggcttaacacatgcaagtcgaggggcagcgagttgtagcaatacaatgtcggcgaccggcggaagggtgcgtaacgcgtgagcaacatgcccgtatctgggggataggagatggaaacgtcttataataccccataacaacagaggctgcatggcctttgtttgaaagattcattggatacggattgg

SEQ ID NO: 234 - DNA, 225 bp, Unknown
  Encodes 16S rRNA from Clostridium XlVa
agagtttgatcctggctcaggatgaacgctggcggcgtgcctaacacatgcaagtcgagcggacttaagaaaagaatcttcggatgaaatttttaagttagcggcggatgggtgaggaacgcgtggagaacctgcccttcacagggggataacagctggaaacggctgttaataccgcatatgctcacggagccgcatggccccgggaggaaagctccggcggtg

SEQ ID NO: 235 - DNA, 225 bp, Unknown
  Encodes 16S rRNA from Paenibacillus
agagtttgatcatggctcaggatgaacgctggcggcgtgcttaatacatgcaagtcgaacggatgagttttctagcttgctagaagatgattcagtggcgaacgggtgagtaatacgtaggcaacctgccccaaagcgggggatagcagttggaaacgactattaataccgcataggtaatcttaaggcatcttgagattattaaaggtgcgtttgcaccgctgt

SEQ ID NO: 236 - DNA, 225 bp, Unknown
  Encodes 16S rRNA from Ruminococcus
agagtttgatcatggctcaggacgaacgctggcggcacgcctaacacatgcaagtcgaacggtagatacttagcttgctttgtatctatagtggcggacgggtgagtaacacgtgagcaacctgcctctgagagagggatagcttctggaaacggatggtaatacctcatgacatagtgtcttcgcatggagatgctatcaaacgaatctcgctcagagatgggc

SEQ ID NO: 237 - DNA, 225 bp, Unknown
  Encodes 16S rRNA from Prevotella
agagtttgatcctggctcaggatgaacgctagctacaggcttaacacatgcaagtcgaggggcagcatggggatggcttgccattcccgatggcgaccggcgcacgggtgagtaacgcgtatccaacctgcccgcaaccgcggaatagcccgccgaaaggcggattaatgccgcatgagctcgcgtgaggacatctgcccgcgagcaaaggttcgttccggttgc

SEQ ID NO: 238 - DNA, 225 bp, Unknown
  Encodes 16S rRNA from Haematobacter
agagtttgatcatggctcagaacgaacgctggcggcaggcctaacacatgcaagtcgagcgagatcttcggatctagcggcggacgggtgagtaacgcgtgggaacgtaccctttgcttcggaatagcctcgggaaactgggagtaataccgaatgtgccctacgggggaaagatttatcggcaaaggatcggcccgcgttggattaggtagttggtgaggtaat

SEQ ID NO: 239 - DNA, 225 bp, Unknown
  Encodes 16S rRNA from Prevotella
agagtttgatcctggctcaggatgaacgctagctacaggcttaacacatgcaagtcgaggggcatcatgggggttgtttacaatccctgatggcgaccggcgcacgggtgagtaacgcgtatccaacctgccttcgagtcagggataaccttccgaaagggagcctaatacctgatgcagtgcgatgatggcatcagaattgcactaaagctttagcgctcggag

SEQ ID NO: 240 - DNA, 225 bp, Unknown
  Encodes 16S rRNA from Clostridium XlVa
agagtttgatcctggctcaggatgaacgctggcggcgtgcctaacacatgcaagtcgaacggagatatcacggatgaaggattcgtctgaattctgttttatcttagtggcggacgggtgagtaacgcgtggagaacctgcctctttccgggggatagcagttggaaacgactggtaataccgcatgagcgcacagtaccgcatggtacggggtgaaaagattta

SEQ ID NO: 241 - DNA, 225 bp, Unknown
  Encodes 16S rRNA from Lachnospiracea incertae sedis
agagtttgatcctggctcaggatgaacgctggcggcgtgcttaacacatgcaagtcgagcgaagcgctttggaagattccttcgggatgaatcctttgtgacttagcggcggacgggtgagtaacgcgtgggcaacctgccttgtacagggggataacagttagaaatgactgctaataccgcataagcgcacagcatggcatcatgcagtgcgaaaaactccgg

SEQ ID NO: 242 - DNA, 164 bp, Unknown
  Encodes 16S rRNA from Enterorhabdus
agagtttgatcatggctcaggatgaacgctggcggcgtgcctaacacatgcaagtcgaacgaagcacttttgcattcgaggaagacagcacgtaaataaacgtgttatttgacgttagagtgtgaataagcaccggcaaactccgtgccagcagccgcggtaat

SEQ ID NO: 243 - DNA, 225 bp, Unknown
  Encodes 16S rRNA from Blautia
agagtttgatcatggctcaggatgaacgctggcggcgtgcctaacacatgcaagtcgaacggagattcattggaaataagcttcggcagaaataagatggatcttagtggcggacgggtgagtaacgcgtggagaacctgccctgtacagggggataacatccagaaatggatgctaaaaccgcataagcgcacatgaccgcatggtcaagtgtgaaaaactccg

SEQ ID NO: 244 - DNA, 225 bp, Unknown
  Encodes 16S rRNA from Sporobacter
agagtttgatcatggctcaggatgaacgctggcggcgtgcctaacacattcaagtcgaacggagaagggacttcggtcccggatcagtggcggacgggtgagtaacgcgtgagcaacctgcctttgcccgggggataacagccggaaacagctgctaataccgcataacgtacggacgccgcatgacgaccgtaccaaagatttattgggcaaagatgggctcgc

SEQ ID NO: 245 - DNA, 225 bp, Unknown
  Encodes 16S rRNA from Oscillibacter
agagtttgatcatggctcaggacgaacgctggcggcgtgcctaacacatgcaagtcgaacgggacttaatggaatgagacttcggtcaaaggaagttaagtttagtggcggacgggtgagtaacgcgtgagcaacctgcctttcagagggggacaacagttggaaacgactgctaataccgcataacgtacggaggaggcatctttttcgtaccaaagatttatc

SEQ ID NO: 246 - DNA, 225 bp, Unknown
  Encodes 16S rRNA from Clostridium XlVa
agagtttgatcctggctcaggatgaacgctggcggcgtgcctaacacatgcaagtcgaacggggatagagagaagttttcggacagacctttatcttagtggcggacgggtgagtaacgcgtggataacctgcctttttctgggggatagcagttggaaacgactgataataccgcataagctccgattcccgcatgggagccggaggaaagatttatcgggaga

SEQ ID NO: 247 - DNA, 225 bp, Unknown
  Encodes 16S rRNA from Atopobium
agagtttgatcatggctcaggatgaacgctggcggcgcgcctaacacatgcaagtcgaacggttaaagccccttcgggggtgtataaagtggcgaacggctgagtaacacgtgggcaacctacctcttgctctgggatagcctcgagaaatcgtgggtaataccggatactccgtaaccgtcgcatggcggatacgggaaagcgcatacggcaagagatgggccc

SEQ ID NO: 248 - DNA, 225 bp, Unknown
  Encodes 16S rRNA from Sporobacter
agagtttgatcatggcttaggatgaacgctggcggcgtgcataacacattcaagtcgaacgatgaacggacttcggtccgggattagtggcggacgggtgagtaacgcgtgagcaacctgccccggagtgagggataacagacggaaacatctgctaatacctcatatagcatcgggttcgcatgtacctggtatgaaaggtttactgctccgggatgggctcgc

SEQ ID NO: 249 - DNA, 225 bp, Unknown
  Encodes 16S rRNA from Clostridium XlVa
agagtttgatcctggctcaggatgaacgctggcggcgtgcctaacacatgcaagtcgaacggggtgtccgatcttcggactggacacttagtggcggacgggtgagtaacgcgtgggtaacctgcctcatacagggggatagcagttggaaacgactgataataccgcataagcgcacagcatcgcatgatgcagtgtgaaaaactccggtggtatgagatggac

SEQ ID NO: 250 - DNA, 225 bp, Unknown
  Encodes 16S rRNA from unknown taxa
agagtttgatcatggctcaggatgaacgctggcggcgtgtttaaggcatgcaagtcgaatgggtttagacccatggcaaacgggagagtaatactttggtaatttaccccttagtcgtgaataactattcgaaagattagataatacacgatggtctcaaagaactcgagttttttgagtaaagatttatcgctaagggagaagcctaaggactatcagctagtt

SEQ ID NO: 251 - DNA, 225 bp, Unknown
  Encodes 16S rRNA from Oscillibacter
agagtttgatcatggctcaggatgaacgctggcggcgtgcctaacacatgcaagtcgaacggagcttaatggaaggagacttcggtcaacggaagataagcttagtggcggacgggtgagtaacgcgtgagcaacctgcctcagagtgggggacaacagctggaaacggctgctaataccgcataaaattgttagaaggcatcttctgataatcaaagcttaatg

SEQ ID NO: 252 - DNA, 225 bp, Unknown
  Encodes 16S rRNA from Clostridium XlVa
agagtttgatcatggctcaggatgaacgctggcggcgtgcttaacacatgcaagtcgaacgaggtttaagacttcggttttaaaccgagtggcggacgggtgagtaacgcgtgggtaacctgccgtatgcagggggacaacagttagaaatgactgctaataccgcataagcttacagtatcgcatgatacagtgagaaaagatttatcggcatacgatggaccc

SEQ ID NO: 253 - DNA, 225 bp, Unknown
  Encodes 16S rRNA from Clostridium IV
agagtttgatcctggctcaggacgaacgctggcggtatgcttaatacatgcaagtcgaacggagcttagcggaagcttgcttctgcgaaagcttagtggcggacgggtgagtaacgcgtgagtaacctgccttaaagagggggataacacagagaaatttgtgctaataccgcataatgtagcgaagccgcatgactttgctaccaaaggtcagccgctttaaga

SEQ ID NO: 254 - DNA, 225 bp, Unknown
  Encodes 16S rRNA from Mogibacterium
agagtttgatcatggctcaggatgaacgctggcggcgtgcctaatacatgcaagtcgagcgagaatctcttcagaagcgttttcggacaattccgaggagaggaaagcggcggacgggtgagtaacgcgtaggcaacctgcccttagcagagggatagccattggaaacgatgattaaaacctcataatgccatctttacacatgtttagatggccaaagattta

SEQ ID NO: 255 - DNA, 225 bp, Unknown
  Encodes 16S rRNA from Roseburia
agagtttgatcatggctcaggatgaacgctggcggcgtgcttaacacatgcaagtcgaacgaatttttttctgaaggaagcttcggcagacggaaggaagaagtgagtggcggacgggtgagtaacgcgtgggtaacctgcctcacattgggggataccagtcggaaacgactgctaataccgcataagaccacggcaccgcatggtgctgtggccaaaactccg

SEQ ID NO: 256 - DNA, 225 bp, Unknown
  Encodes 16S rRNA from Lachnospiracea incertae sedis
agagtttgatcctggctcaggatgaacgctggcggcgtgcttaacacatgcaagtcgagcgaagcgctctggaagattcctttgggatgattccttagtgacttagcggcggacgggtgagtaacgcgtgggcaacctgccttgtacagggggataacagttagaaatgactgctaataccgcataagcgcacagcatggcatcatgcagtgtgaaaaactccgg

SEQ ID NO: 257 - DNA, 225 bp, Unknown
  Encodes 16S rRNA from Pelotomaculum
agagtttgatcatggctcaggacgaacgctggcggcgtgcctaacacatgcaagtcgaacggagattaagatttcggttttaatctgagtggcgaacgggtgagtaacgcgtgagcaacctgcccttcagagggggataaccgctggaaacagcagctaataccgcataagaccacagcccggcatcggggaggggtcaaaggagcaatccgctgaaggaggggc

SEQ ID NO: 258 - DNA, 225 bp, Unknown
  Encodes 16S rRNA from Pelotomaculum
agagtttgatcctggctcaggacgaacgctggcggcgtgcctaacacatgcaagtcgaacggagcaggggacttcggttctctgctgagtggcgaacgggtgagtaacgcgtgagcaacctgaccttgagagggggataacgacgggaaactgtcgctaataccgcatgagaccacagcccggcatcggggaggggtcaaaggagaaatccgctgaaggaggggc

SEQ ID NO: 259 - DNA, 225 bp, Unknown
  Encodes 16S rRNA from Clostridium XlVa
agagtttgatcatggctcaggatgaacgctggcggcgtgcctaacacatgcaagtcgaacggagctgcgacgctgaggagtggagtacttgtacaaagcgaatcttgtcgtagcttagtggcggacgggtgagtaacgtgtggataacctggtccatccagggggatagcagctggaaacggctggtaataccgcataagcgcacagagaggcatctctcggtgt

SEQ ID NO: 260 - DNA, 225 bp, Unknown
  Encodes 16S rRNA from Robinsoniella
agagtttgatcctggctcaggatgaacgctggcggcacgcttaacacatgcaagtcgaacgagggaaaaggagcttgctcctttgacctagtggcggacgggtgcgtaacgcgtgggtaatctgccctgcacagggggataacgtatagaaatgtacgctaataccgcataagcccacagagtggcatcactcagggggaaaagcgaatacggtgcaggatgagc

SEQ ID NO: 261 - DNA, 225 bp, Unknown
  Encodes 16S rRNA from Coprococcus
agagtttgatcatggctcaggataaacgctggcggcgtgcttaacacatgcaagtcgaacggactgattaggtagcttgctacttatgaaagttagtggcggacgggtgagtaacgcgtgggtaacctgcctcacacagggggataacagttggaaacgactgttaataccgcataagcgcacaggatcgcatggtctagtgtgaaaaactccggtggtgtgaga

SEQ ID NO: 262 - DNA, 225 bp, Unknown
  Encodes 16S rRNA from Wautersiella
agagtttgatcctggctcaggatgaacgctagcgggaggcttaacacatgcaagccgaggggtatttgtggcttgctacaaagagaccggcgcacgggtgcgtaacgcgtatgcaacttgccctactgaaagggatagccttttgaaaagaagattaataccttataatagtgagactggcatcagtaacacttgaaagatttatcgcagtaggataggcatgcg

SEQ ID NO: 263 - DNA, 184 bp, Unknown
  Encodes 16S rRNA from Lachnospiracea incertae sedis
agagtttgatcatggctcaggatgaacgctggcggcgtgctttgcacaatgggggaaaccctgatgcagcgacgccgcgtgagtgatgaagtatttcggtacgtaaaactctatcagcagggaagaaaatgacggtacctgactaagaagcaccggctaaatacgtgccagcagccgcggtaat

SEQ ID NO: 264 - DNA, 225 bp, Unknown
  Encodes 16S rRNA from Planctomyces
agagtttgatcctggctcagaatgaacgttggcggcatggattaggcatgcaagtcgtacggtgaaggggagcttgctcctccgatcagtggcgaaagggatagtaacgcgtagacacctaccttctggacggggatagctgcgggaaactgcaggtaatacccgataatgacgagagtccaaaggtgtaattccttcagaagacggatctgcgtcctaccagat

SEQ ID NO: 265 - DNA, 225 bp, Unknown
  Encodes 16S rRNA from Treponema
agagtttgatcctggctcagaacgaacgctggcggcgcgtcttaagcatgcaagtcgagcgggaataagggagcttgcttccttatgagagcggcggactggtgagtaacacgtgggtaacgcaccctcctgacggggacagcctgtggaaacacagggtaataccggatgagatggacttctggaagggagttcatgaaaggagctacggctccgcagggggaa

SEQ ID NO: 266 - DNA, 225 bp, Unknown
  Encodes 16S rRNA from Coprococcus
agagtttgatcatggctcaggatgaacgctggcggcgtgcctaacacatgcaagtcgaacgagagagattggtgcttgcaccgatcaatcgagtggcggacgggtgagtaacgcgtgggtaacctgcctcatacagggggataacaactggaaacggttgataataccgcataagcgcacggtatcgcatgatacagtgtgaaaaactccggtggtatgagatgg

SEQ ID NO: 267 - DNA, 225 bp, Unknown
  Encodes 16S rRNA from Paracoccus
agagtttgatcctggctcagaacgaacgctggcggcaggcctaacacatgcaagtcgagcgaacccttcggggttagcggcggacgggtgagtaacgcgtgggaacgtgccctttgctacggaatagccccgggaaactgggagtaataccgtatacgcccttagggggaaagatttatcggcaagggatcggcccgcgttggattaggtagttggtggggtaat

SEQ ID NO: 268 - DNA, 225 bp, Unknown
  Encodes 16S rRNA from Ruminococcus
agagtttgatcatggctcaggacgaacgctggcggcacgcctaacacatgcaagtcgaacggtgaatgatcagtttactgaacattcatagtggcggacgggtgagtaacacgtgagcaacctgcctctgagagagggatagcttctggaaacggatggtaatacctcatgatatagcgttctcgcatgggaatgctatcaaaagaaattcgctcagagatgggc

SEQ ID NO: 269 - DNA, 225 bp, Unknown
  Encodes 16S rRNA from Atopobium
agagtttgatcatggctcaggatgaacgctggcggcgcgcctaacacatgcaagtcgaacggttaaagccccttcgggggtgtataaagtggcgaacggctgagtaacacgtgggcaacctacctcttgctctgggatagcctcgggaaaccgtgggtaataccggatactctgtaactgtcgcatggcggatacaggaaagcgcatacggcaagagatgggccc

SEQ ID NO: 270 - DNA, 225 bp, Unknown
  Encodes 16S rRNA from Prevotella
agagtttgatcctggctcaggatgaacgctagctacaggcttaacacatgcaagtcgaggggcagcatggaggtagcttgctatctccgatggcgaccggcgcacgggtgagtaacgcgtatccaaccttccctgaggtaggggacagcccggtgaaaaccggattaataccctatgttgtcacgataaggcatctgagcgtgacgaaagattcatcgcctcagg

SEQ ID NO: 271 - DNA, 225 bp, Unknown
  Encodes 16S rRNA from Clostridium IV
agagtttgatcatggctcaggatgaacgctggcggcgtgcctaacacattcaagtcgaacggtgaagggacttcggtcccggatcagtggcggacgggtgagtaacgcgtgagcaacctaccttcttgtgggggataacacagggaaacttgtgctaataccgcataacgtatctgacccgcatggggcggataccaaagatttattgcagggagatgggctcgc

SEQ ID NO: 272 - DNA, 225 bp, Unknown
  Encodes 16S rRNA from Clostridium XlVa
agagtttgatcatggctcaggatgaacgctggcggcgtgcctaacacatgcaagtcgagcggagttacattagcttgcttttgtaacttagcggcggatgggtgaggaacgcgtggataacctgcctcacactgggggataacagctggaaacggctgttaataccgcatatgctcacagtaccgcatggtacagggaggaaagatttatcggtgtgagatggat

SEQ ID NO: 273 - DNA, 225 bp, Unknown
  Encodes 16S rRNA from Clostridium XlVa
agagtttgatcctggctcaggatgaacgctggcggcgtgcctaacacatgcaagtcgagcggaggatcacattggaagccttcgggtggaagaagtgaaacttagcggcggacgggtgagtaacgcgtgggtaacctggctcatacagggggataacagagagaaatttctgctaataccgcataagcgcacagcaccgcatggtgcagtgtgaaaaactccggt

SEQ ID NO: 274 - DNA, 225 bp, Unknown
  Encodes 16S rRNA from Clostridium XlVa
agagtttgatcatggctcaggatgaacgctggcggcgtgcttaacacatgcaagtcgaacgaagcatttcggaatgcggcttcggccaaatgaagaactgacttagtggcggacgggtgagtaacgcgtgggtaacctgccttgtactgggggataacagttagaaatgactgctaataccgcataagcccacggtttcgcatggaactgtgagaaaagatttat

SEQ ID NO: 275 - DNA, 225 bp, Unknown
  Encodes 16S rRNA from Prevotella
agagtttgatcctggctcaggatgaacgctagctacaggcttaacacatgcaagtcgaggggcatcgagaagaaagcttgctttctttgtcggcgaccggcgcacgggtgagtaacgcgtatccaacctaccctttacactgggatagcccgttgaaaagcggattaataccagatgcagtcctttgcggacatctaagtaggacgaaaggtttttccggtagag

SEQ ID NO: 276 - DNA, 225 bp, Unknown
  Encodes 16S rRNA from Dethiosulfovibrio
agagtttgatcatggctcaggatgaacgctggcggcgtgcataacacattcaagtcgaacgaagcgccgggacggaacccttcggggggaagacccgatgacttagtggcggacgggtgagtaacgcgtgagcaacctgcctgcgatagagggataacaccgggaaaccggtgctaataccacatgacgcagcggggtcacatggccctgttgttaaagatttat

SEQ ID NO: 277 - DNA, 225 bp, Unknown
  Encodes 16S rRNA from Clostridium XI
agagtttgatcctggctcaggacgaacgctggcggcgtgcttaacacatgcaagtcgaacgaagatacggagcggaacccttcggggggaagatctgtagactgagtggcggacgggtgagtaacgcgtgagcaacctgcctacaagagggggacaacagctggaaacggctgctaataccgcataagaccacgctatcgcatggtagaggggtcaaagatttat

SEQ ID NO: 278 - DNA, 225 bp, Unknown
  Encodes 16S rRNA from Clostridium IV
agagtttgatcatggctcaggacgaacgctggcggcgtgcttaacacatgcaagtcgaacgaagttccgttgaatgagatttcggtcaaaggagacggacacttagtggcggacgggtgagtaacgcgtgagtaacctgcctttcagaggggaataacatttggaaacgaatggtaataccgcataacatcaaggagccgcatggcactttgatcaaaggagcaa

SEQ ID NO: 279 - DNA, 225 bp, Unknown
  Encodes 16S rRNA from Saccharofermentans
agagtttgatcatggctcaggatgaacgctggcggcgtgcctaacacattcaagtcgaacggagatatacggaagcttgcttttgtatattttagtggcggacgggtgagtaatgcatgagcaacctgccttaaagagggggataacacagagaaatttgtgctaataccgcataagctgcgaaggaggcatctcccatgcagaaaaggagcaatccgctttaag

SEQ ID NO: 280 - DNA, 225 bp, Unknown
  Encodes 16S rRNA from Clostridium sensu stricto
agagtttgatcatggctcaggacgaacgctggcggcgcgcctaacacatgcaagtcgaacggaacttttgagtgacttcggtctctcttgagtttagtggcggacgggtgagtaaagcatgagtaactttcccttgagtggggaataacttttggaaacagaagataataccgcatacttcaaaggatcgcatgatcttttggcaaagattttcgcttttggata

SEQ ID NO: 281 - DNA, 225 bp, Unknown
  Encodes 16S rRNA from Roseburia
agagtttgatcatggctcaggatgaacgctggcggcgtgcctaacacatgcaagtcgaacgaagcatagagattagatttcttcggattgaagatttttatgacttagtggcgaacgggtgagtaacgcgtgggtaacctgcctcatgcagggggataacaattagaaatgattgctaataccgcataagaccgcagaaccgcatggttgagcggccaaagattt

SEQ ID NO: 282 - DNA, 225 bp, Unknown
  Encodes 16S rRNA from Lachnospiracea incertae sedis
agagtttgatcctggctcaggatgaacgctggcggcgtgcttaacacatgcaagtcgaacgaagcacttacacttgatttcttcggattgaaagagtttgtgactgagtggcggacgggtgagtaacgcgtggataacctgcccttcacagggggataacagttagaaatgactgctaataccgcataagcgcacactaaggcatcttagggtgtgaaaagctcc

SEQ ID NO: 283 - DNA, 225 bp, Unknown
  Encodes 16S rRNA from unknown taxa
agagtttgatcatggctcaggatgaacgctagcagaatgcttaacacatgcaagtcgaacgaatcttcggattagtggcagacgagcgagtaacacgtacttaacttgcccttgagttgggaacaactatagagatatagctaattcccaatatgctcacgatggtgaaatcccgatgtgaggaaagatttatcgctcaaggagaggggtgcgtcctatcaggta

SEQ ID NO: 284 - DNA, 225 bp, Unknown
  Encodes 16S rRNA from Hydrogenoanaerobacterium
agagtttgatcatggctcaggacgaacgctggcggcgcgcctaacacatgcaagtcgaacgggattgtttacaatccagtggcggacgggtgagtaatgcatgagtaatctgcctgaaagagggggatagcttctggaaacagaagataataccgcatatttcaaaatttccgcatggtttttttggcaaaggagcaatccactttcagatgagctcatgtccga

SEQ ID NO: 285 - DNA, 225 bp, Unknown
  Encodes 16S rRNA from Victivallis
agagtttgatcatggctcagaacgaacgctggcggcatggattaggcatgcaagtcgaacgaagcagcaatgcttagtggcggaagggtgaggaacgcgtgagcaacctgccctcaagttgggaataacagttggaaacgactgctaataccgaatgtggcttttgaaccgcatggtttattggctaaagatttattgcttgaggatgggctcgcgtcccattag

SEQ ID NO: 286 - DNA, 225 bp, Unknown
  Encodes 16S rRNA from Clostridium IV
agagtttgatcatggctcaggacgaacgctggcggcgtgcctaacacatgcaagtcgaacggagttcttacagatgaagcttcggccgatgaagtttgaacttagtggcggacgggtgagtaacgcgtgagcaacctgccttacagagggggacaacagttggaaacgactgctaataccgcataacgtatttggagggcatcctctggataccaaagatttatc

SEQ ID NO: 287 - DNA, 225 bp, Unknown
  Encodes 16S rRNA from Pelotomaculum
agagtttgatcatggctcaggacgaacgctggcggcgtgcctaacacatgcaagtcgaacggagtaaagagcttcggttttttacttagtggcgaacgggtgagtaacgcgtgagcaacctgactctttgagggggataacagtcggaaacaactgctaataccgcataagaccacgaaccggcatcggtatgaggtcaaaggagcaatccgcagagagaggggc

SEQ ID NO: 288 - DNA, 225 bp, Unknown
  Encodes 16S rRNA from Clostridium XlVa
agagtttgatcatggctcaggatgaacgctggcggcgtgcctaacacatgcaagtcgaacgaagcacttctcccgtcaaagtagattagcttgctatgaagcggagacatttgaagtgacttagtggcggacgggtgagtaacgcgtgggtaacctgccctgtactgggggacaacagttggaaacggctgctaataccgcataagcgcacagcatcgcatggtg

SEQ ID NO: 289 - DNA, 225 bp, Unknown
  Encodes 16S rRNA from Saccharofermentans
agagtttgatcatggctcaggatgaacgctggcggcgtgcttaacacattcaagtcgaacgagcgaggggaagcaattccctttgctagtggcggacgggtgagtaacgcgtgagcaacctacctttacgagtgggataacaattggaaacgattgctaataccgcataacgtatagatatcgcatgacatttataccaaagaaaatcgcgtaaagatgggctcg

SEQ ID NO: 290 - DNA, 225 bp, Unknown
  Encodes 16S rRNA from Lachnospiracea incertae sedis
agagtttgatcatggctcaggatgaacgctggcggcgtgcctaacacatgcaagtcgaacgggaaccttgtgacggagacttcggtcaaagatgcaagaattctagtggcggacgggtgagtaacgcgtgggtaacctgcccttaagaggcgaataacagtgagaaatcactgctaatacgccatatgcttacggaatcgcatgattttgtgaggaaaagaattt

SEQ ID NO: 291 - DNA, 225 bp, Unknown
  Encodes 16S rRNA from Coprococcus
agagtttgatcctggctcaggatgaacgctggcggcgtgcttaacacatgcaagtcgaacgaagcacttacgattgactggagagcttgctcgaagggattttgtttgtgacttagtggcggacgggtgagtaacgcgtgggtaacctgcctcatacagggggataacagttggaaacgactgttaataccgcataagcgcacggtatcgcatgatacagtgtga

SEQ ID NO: 292 - DNA, 225 bp, Unknown
  Encodes 16S rRNA from Clostridium XlVa
agagtttgatcatggctcaggatgaacgctggcggcgtgcttaatacatgcaagtcgaacgaggaattgcgattgaagttttcggatggatttcgcttttccgagtggcggacgggtgagtaacgcgtgggtaacctgccttacacagggggacaacagctggaaacggctgctaataccgcataacccgctagagtcgcatgactcagacggaaaagatttatc

SEQ ID NO: 293 - DNA, 225 bp, Unknown
  Encodes 16S rRNA from Clostridium XlVb
agagtttgatcatggctcaggatgaacgctggcggcgtgcttaacacatgcaagtcgagcgaaggacaaagagcttgctctttgttacttagcggcggacgggtgagtaacgtgtgggcaatctgccctatgcagaggaataacatagagaaatttatgctaatgcctcataaactcttagtactgcatggtacatagagaaaagatttatcggcataggaggag

SEQ ID NO: 294 - DNA, 225 bp, Unknown
  Encodes 16S rRNA from Papillibacter
agagtttgatcatggctcaggatgaacgctggcggcgtgcctaacacattcaagtcgaacggacgagagggggcttgctccctcaagttagtggcggacgggtgagtaacgcgtgagcaacctgccttttttcgggggataacacggggaaaccggtgctaataccgcataacgtaccgagaccgcatgatcatggtaccaaaggagcaatccgaggaaagatgg

SEQ ID NO: 295 - DNA, 225 bp, Unknown
  Encodes 16S rRNA from Bartonella
agagtttgatcctggctcagaacgaacgctgtcgacatgcttaacacatgcaagtcgtacgggtataacttgttataccagtggcaaacgggtgagtaatgcgtaggaatgtacccaatagtctcgaataacaattggaaacgattgataatacgagatacaatggaacatgggaccatgtgacatgaaaggttcagcaatggactgctataggagcagcctacg

SEQ ID NO: 296 - DNA, 225 bp, Unknown
  Encodes 16S rRNA from Clostridium IV
agagtttgatcatggctcaggatgaacgctggcggcgtgcttaacacattcaagtcgaacgagcgagaggaagcaattccttttgctagtggcggacgggtgagtaacgcgtgagcaacctacctttgtgagtgggataacaattggaaacgattgctaataccgcataacgtatagatattgcatgataactataccaaagaaattcgcacaaagatgggctcg

SEQ ID NO: 297 - DNA, 225 bp, Unknown
  Encodes 16S rRNA from Eubacterium
agagtttgatcatggctcaggattaacgctggcggcgtgcctaacacatgcaagtcgagcgagaattaaagaaatgattcttcggatgaatttctttaaggacagcggcggacgggtgagtaacgcgtgggcaacctgcccctttccggaggatagccaagggaaactttgaataatactccataaagcatttttgccgcatgacagagatgccaaagatttatc

SEQ ID NO: 298 - DNA, 225 bp, Unknown
  Encodes 16S rRNA from Asaccharobacter
agagtttgatcctggctcaggatgaacgctggcggcgtgcttaacacatgcaagtcgaacgggaaagcgccctcgggcgcgagtacagtggcgaacgggtgagtaacacgtgaccaacctgccccccgcaccgggatagccgggcgaaagcccgggtaataccggatgaccccgcaccgcggcatcgcggcgcgggcaaagcccagacggcgggggatggggtcg

SEQ ID NO: 299 - DNA, 225 bp, Unknown
  Encodes 16S rRNA from Clostridium IV
agagtttgatcatggctcaggatgaacgctggcggcgtgcataacacattcaagtcgaacggactgatttgatagcttgctattgatgaaagttagtggcggacgggtgagtaacgcgtgagcaacctgcccctatgtgcgggataacgtttggaaacggacgctaataccgcataatccaatggaatcgcatggttttattggcaaagatttattgcataggga

SEQ ID NO: 300 - DNA, 225 bp, Unknown
  Encodes 16S rRNA from Blautia
agagtttgatcatggctcaggatgaacgctggcggcgtgcctaacacatgcaagtcgaacggagcttattttttggagacttcggtcaaagaagcttaagcttagtggcggacgggtgagtaacgcgtggagaacctgccctgtaccgggggataacagccggaaacggctgctaataccgcataagcgcacgaggccgcatggccctgtgtgaaaaactccggt

SEQ ID NO: 301 - DNA, 225 bp, Unknown
  Encodes 16S rRNA from Prevotella
agagtttgatcatggctcaggatgaacgctagctacaggcttaacacatgcaagtcgaggggcatcactggggtggcttgccatccctggtggcgaccggcgcacgggtgagtaacgcgtatccaacctgccccgaaccgcggtatagcccgccgaaaggcggattaatcccgcatgtggtcgtgagatgacatctgaccacgactaaaggtattttccggttcg

SEQ ID NO: 302 - DNA, 225 bp, Unknown
  Encodes 16S rRNA from Ruminococcus
agagtttgatcatggctcaggacgaacgctggcggcacgcttaacacatgcaagtcgaacgaattagtttcaccgtagcttgctacaccgagactaattagtggcggacgggtgagtaacacgtgagcaatctgcctttcagagggggataccagttggaaacgactgttaataccgcataacatatgtttaccgcatgatagacatatcaaagatttatcgctg

SEQ ID NO: 303 - DNA, 150 bp, Unknown
  Encodes 16S rRNA from Selenomonas
agagtttgatcatggctcaggatgaacgctagctacaggcttaacacatgcaagtcgaggggacgaatgttgaggcctagaacataggtttcaaatgacggtacctgacgaggaagccacggctaactacgtgccagcagccgcggtaat

SEQ ID NO: 304 - DNA, 225 bp, Unknown
  Encodes 16S rRNA from Treponema
agagtttgatcatggctcagaacgaacgctggcggcgcgtcttaagcatgcaagtcgaacgggatccacgcgcttgcgcgtggtgagagtggcggactggtgagtaacgcgtaggtgacgtaccctccggacggggatagcccttagaaataaggggtaataccggatacggttccgtgtgtcagaggcacggaaggaaaggagcttcggctccgccgggggatc

SEQ ID NO: 305 - DNA, 225 bp, Unknown
  Encodes 16S rRNA from Adlercreutzia
agagtttgatcatggctcaggatgaacgctggcggcgtgcttaacacatgcaagtcgaacgattaaagccccttcgggggtgtatagagtggcgaacgggtgagtaacacgtgagcaacctacctctcacaccgggataacatatggaaacgtatgctaataccggatactccggaacttacgcatgttcgttccgggaaagctccgacggtgagagatgggctc

SEQ ID NO: 306 - DNA, 225 bp, Unknown
  Encodes 16S rRNA from Butyricicoccus
agagtttgatcatggctcaggacgaacgctggcggcgtgcctaacacatgcaagtcgaacggaactattttgactgattccttcgggatgaagaatttttagtttagtggcgatcggtagccggactgagaggttgaacggccacattgggactgagacacggcccagactcctacgggaggcagcagtgggggatattgcgcaatgggggcaaccctgacgcag

SEQ ID NO: 307 - DNA, 225 bp, Unknown
  Encodes 16S rRNA from Pseudoflavonifractor
agagtttgatcatggctcaggacgaacgctggcggcgtgcttaacacatgcaagtcgaacgaggaatgttgaaaagcttgctttttaacatttcgagtggcggacgggtgagtaacgcgtgaggaacctgtcttctacagggggataacgtcccgaaagggacgctaataccgcataagaccacggtatcgcatgatacaggggtcaaaggagcaatccggtaga

SEQ ID NO: 308 - DNA, 225 bp, Unknown
  Encodes 16S rRNA from Corynebacterium
agagtttgatcctggctcaggacgaacgctggcggcgtgcttaacacatgcaagtcgaacggtaaggccccagcttgctggggtacacgagtggcgaacgggtgagtaacacgtgggtgacctgccccgcacttcgggataagcctgggaaactgggtctaataccggataggaccgcaccgtgagggtgtggtggaaagtttttcggtgtgggatgggcccgcg

SEQ ID NO: 309 - DNA, 225 bp, Unknown
  Encodes 16S rRNA from Adlercreutzia
agagtttgatcatggctcaggatgaacgctggcggcgtgcttaacacatgcaagtcgaacggttaaagccccttcgggggtgtataaagtggcgaacgggtgagtaacacgtgagcaacctacctctcacaccgggataacaactggaaacggttgataataccggatactccgattggatcgcatgttcctttcgggaaagctccgacggtgagagatgggctc

SEQ ID NO: 310 - DNA, 225 bp, Unknown
  Encodes 16S rRNA from Selenomonas
agagtttgatcctggctcaggacgaacgctggcggcgtgcttaacacatgcaagtcgaacgagacgattgaaagcttgcttttgagagtcgagtggcaaacgggtgagtaacgcgtagacaacctgccgcaaagatggggacaacagtccgaaaggactgctaataccgaatgttgtgcaatctccgcatggaggatgcattaaagatggcctctacttgtaagc

SEQ ID NO: 311 - DNA, 225 bp, Unknown
  Encodes 16S rRNA from Coraliomargarita
agagtttgatcatggctcagagtgaacgctggcgacgtggctaagacatgcaagtcgagcgagaaggtgccttcgggtgccggaaagcggcaaacgggtgcgtaacacgtaagtaacctgcccttaagacgggaatagcttgatgaaaattgagataatgcccgatatcgaattcttccgcatgggagaagtttgaaaggtttgtgatgacgcttaaggaggggc

SEQ ID NO: 312 - DNA, 225 bp, Unknown
  Encodes 16S rRNA from Paraprevotella
agagtttgatcatggctcaggatgaacgctagcggcaggcttaacacatgcaagtcgaggggcagcgagtcggtagcaatactgatgtcggcgaccggcgcacgggtgagtaacgcgtatgcaacctttcccagacagggggatagcccagggaaacttggattaataccccgtaggccagaggagggcatcctcgtctggttaaagttccggcggtctggggtg

SEQ ID NO: 313 - DNA, 225 bp, Unknown
  Encodes 16S rRNA from Oscillibacter
agagtttgatcatggctcaggacgaacgctggcggcgtgcctaacacatgcaagtcgaacgggacttattggaatgagacttcggtcaaaggaaaataagtttagtggcggacgggtgagtaacgcgtgagcaacctgcctttcagagggggacaacagttggaaacgactgctaataccgcataacgtgtattggaggcatcttcggtacaccaaagatttatc

SEQ ID NO: 314 - DNA, 225 bp, Unknown
  Encodes 16S rRNA from Anaerovorax
agagtttgatcatggctcaggatgaacgctggcggcgtgcctaacacatgcaagtcgagcgagaaacctttgattgacacttcggttgatttcaaaggcggaaagcggcggacgggtgagtaacgcgtaggcaacctgccccttgcagagggatagcctcgggaaaccgggattaaaacctcataacaccgaacctacacatgttcgatcggtcaaagatttatc

SEQ ID NO: 315 - DNA, 225 bp, Unknown
  Encodes 16S rRNA from Clostridium XlVa
agagtttgatcctggctcaggatgaacgctggcggcgtgcataacacatgcaagtcgaacggagttacattgaaacctagtgatatgtaacttagtggcggacgggtgagtaacgcgtgggtaacctacctggtattgggggacaacagttagaaatgactgctaataccgcatacgtcatcgagagggcatcctcttgatgagaaaggagcaatccgacatcag

SEQ ID NO: 316 - DNA, 225 bp, Unknown
  Encodes 16S rRNA from Saccharofermentans
agagtttgatcatggctcaggacgaacgctggcggcgtgcctaacacatgcaagtcgagcggagtaagtggagagcttgcttgaaacttacttagcggcggacgggtgagtaacgcgtgagcaacctgtcctctgcagggggataagacagcgaaagttgttctaataccgcatgagaccacaacgtcacatggcgaaggggtcaaaggaggaatccggcagagg

SEQ ID NO: 317 - DNA, 225 bp, Unknown
  Encodes 16S rRNA from Erysipelothrix
agagtttgatcatggctcaggatgaacgctggcggcgtgcctaatacatgcaagtcgaacggggtaccttcgggtacctagtggcgaacgggtgagtaacacataaacaatctgccctggagactgggataccgtcgggaaaccgacgctaataccggataggcagtaagggggcatctccatactgttaaagctgggttgcagcgctgcaggatgagtttatgt

SEQ ID NO: 318 - DNA, 225 bp, Unknown
  Encodes 16S rRNA from Agaricicola
agagtttgatcatggctcagaacgaacgctggcggcaggcttaatccatgcaagtcaagggggtgtagcaatacacaaccggcgtacgggtgagtaacgcgtgggaatgtgtccatttgtggggaatagcttctggaaacggaaggtaataccgcatacgcccttcgggggaaagatttatcgcagatggagcggcccgcgttagattagctagttggtggggta

SEQ ID NO: 319 - DNA, 225 bp, Unknown
  Encodes 16S rRNA from Denitrobacterium
agagtttgatcatggctcaggatgaacgctggcggcgtgcctaacacatgcaagtcgaacgaataacccgccttcgggcggtcatagagtggcgaacgggtgagtaacacgtgaccaaccttccccccgcatggggataaccgggcgaaagcccggctaatacccaatactccgggccctccgcatggaggggccgggaaagcccaggcggcgggggatggggtc

SEQ ID NO: 320 - DNA, 225 bp, Unknown
  Encodes 16S rRNA from unknown taxa
agagtttgatcatggctcaggacgaacgctagcgacgtgcctaagaaatgcaagtcgagcgatgacggtggcttcggctgcctgattagcggcgaacggtcgcgtaacacgtaagcaatctgccccaaagtttgggatagccatccgaaaggatgattaataccggatgtggaatatatatcgcatgttatatattctaaagtagcgatacgctttgggatgagc

SEQ ID NO: 321 - DNA, 225 bp, Unknown
  Encodes 16S rRNA from Asaccharobacter
agagtttgatcctggctcaggatgaacgctggcggcgtgcttaacacatgcaagtcgaacgattaaaccggcttcggccggatatagagtggcgaacgggtgagtaacacgtgaccaacctgccccccgcttcgggataactgctggaaacggcagctaataccggatactccttcagcaccgcatggtgctccagggaaagatttatcggcgagggatggggtc

SEQ ID NO: 322 - DNA, 225 bp, Unknown
  Encodes 16S rRNA from Anaeroplasma
agagtttgatcatggctcaggattaacgctggcggcatgcctaatacatgcaagtcgaatgaattagattcatggcgaacgggtgagtaacacgtaggtaatctaccataaagacaaggataaccattggaaacgatggataagactcgataggacacgaagtcgcatgactttgtgtttaaaggttacgctttatgaggagcctgcggtgcattagctagttgg

SEQ ID NO: 323 - DNA, 225 bp, Unknown
  Encodes 16S rRNA from Prevotella
agagtttgatcctggctcaggatgaacgctagctacaggcttaacacatgcaagtcgaggggcagcatgacggtagcttgctatcgttgatggcgaccggcgcacgggtgagtaacgcgtatccaaccttcccatgactccggttcagcccgccgaaaggcggattactcccggatggtttccgaagagggcctctgatttggaataaagattcatcggtcatgg

SEQ ID NO: 324 - DNA, 225 bp, Unknown
  Encodes 16S rRNA from Lachnospiracea incertae sedis
agagtttgatcctggctcaggatgaacgctggcggcgtgcttaacacatgcaagtcgaacgaggaactgtgaatgaaattttcggatggatttcgcttttccgagtggcggacgggtgagtaacgcgtggataacctgcccttcacagggggacaacagtcggaaacgactgctaataccgcataagccgacggagtcgcatgactcagccggaaaagatttatc

SEQ ID NO: 325 - DNA, 225 bp, Unknown
  Encodes 16S rRNA from Clostridium IV
agagtttgatcatggctcaggacgaacgctggcggcgtgcctaacacatgcaagtcgagcggacttatagatagaaagtgcttgcactggacatttacaagttagcggcggacgggtgagtaacgcgtgagcaacctgtcctctacagggggataagatctcgaaagggattctaataccgcatgagaccacagcagggcatcctgcgggggtcaaaggaggaat

SEQ ID NO: 326 - DNA, 225 bp, Unknown
  Encodes 16S rRNA from Streptococcus
agagtttgatcctggctcaggacgaacgctggcggcgtgcctaatacatgcaagtagaacgctgaagactttagcttgctaaagttggaagagttgcgaacgggtgagtaacgcgtaggtaacctgcctactagcgggggataactattggaaacgatagctaataccgcataacagcatttaacccatgttagatgcttgaaaggagcaattgcttcactagta

SEQ ID NO: 327 - DNA, 166 bp, Unknown
  Encodes 16S rRNA from Cellulosilyticum
agagtttgatcatggctcaggatgaacgctggcggcgtgcttaacacatgcaagtcgaacggagtttaagaaggttttcggattgtaaactcctgtttcgagggacgataatgacggtacctcgggaggaagctccggctaactacgtgccagcagccgcggtaat

SEQ ID NO: 328 - DNA, 225 bp, Unknown
  Encodes 16S rRNA from Asaccharobacter
agagtttgatcctggctcaggatgaacgctggcggcgtgcttaacacatgcaagtcgaacgattaaagcgccttcgggcgtgtatagagtggcgaacgggtgagtaacacgtgatcaacctacctcgtacttcgggatagcctcgtgaaaacgggattaataccggatactccgattaaatcgcatgattctttcgggaaagcctttacggtacgagatgggatc

SEQ ID NO: 329 - DNA, 225 bp, Unknown
  Encodes 16S rRNA from Enterorhabdus
agagtttgatcctggctcaggatgaacgctggcggcgtgcctaacacatgcaagtcgaacggttaaaccggcttcggccggaaataaagtggcgaacgggtgagtaacacgtgaccaacctgccccgcgcaccgggacagccccccgaaagggggattgataccggatactccgccgggcccgcatgggcccggcgggaaagctccggcggcgcgggatggggtc

SEQ ID NO: 330 - DNA, 225 bp, Unknown
  Encodes 16S rRNA from Treponema
agagtttgatcctggctcagaacgaacgctggcggcgcgtcttaagcatgcaagtcgagcgggattcatgtgcttgcacatgatgagagcggcggactggtgagtaacacgtaggtgacgtaccttgaggacggggacagccggcagaaatgccgggtaataccggataagctcgcgcgagccggaatcgcgcgaggaaaggagctaaggctccgcctctagagc

SEQ ID NO: 331 - DNA, 225 bp, Unknown
  Encodes 16S rRNA from Roseburia
agagtttgatcctggctcaggatgaacgctggcggcgtgcctaacacatgcaagtcgaacggagcacattaagcgagaccttcgggtggaactttttatgcttagtggcggacgggtgagtaacgcgtgggtaacctgccttatacagggggataacagagagaaatttctgctaataccccataagcgcacagtatcgcatgatacagggtgaaaaggatttcc

SEQ ID NO: 332 - DNA, 225 bp, Unknown
  Encodes 16S rRNA from Victivallis
agagtttgatcctggctcagaacgaacgctggcggcatggattaggcatgcaagtcgaacgaagcagcaatgcttagtggcggaagggtgaggaacgcgtgagtaatctgccctcaagttgggaataacagctggaaacggctgctaataccgaatgtggctgcaagaccgcatgattttgcagttaaagatttattgcttgaggatgagctcgcgtcccattag

SEQ ID NO: 333 - DNA, 225 bp, Unknown
  Encodes 16S rRNA from Prevotella
agagtttgatcatggctcaggatgaacgctagctacaggcttaacacatgcaagtcgcggggcatcatgaagggagcttgctctctttgatggcgaccggcgcacgggtgagtaacgcgtatccaacctgccccctagtagggaacagcccgtagaaatgcggattaatgccctatgttctccgaagacggcatcagattcggagcaaaggcctttggccgctag

SEQ ID NO: 334 - DNA, 225 bp, Unknown
  Encodes 16S rRNA from Roseburia
agagtttgatcctggctcaggatgaacgctggcggcgtgcttaacacatgcaagtcgaacggagatatcggcttcggctgatatctcagtggcggacgggtgagtaacgcgtgggtaacctgccttacaccgggggacaacagttggaaacgactgctaataccgcataagaccacggagccgcatggccctggggtaaaagatttatcgatgtaagatggaccc

SEQ ID NO: 335 - DNA, 225 bp, Unknown
  Encodes 16S rRNA from Ruminococcus
agagtttgatcctggctcaggacgaacgctggcggcacgcctaacacatgcaagtcgaacggtgaatgattagcttgctagacattcatagtggcggacgggtgagtaacacgtgagcaacctgcctctgagagagggatagcttctggaaacggatggtaatacctcatgatatagcattctcgcatgggaatgctatcaaatgaatttcgctcagagatgggc

SEQ ID NO: 336 - DNA, 225 bp, Unknown
  Encodes 16S rRNA from Mogibacterium
agagtttgatcatggctcaggatgaacgctggcggcgtgcctaatacatgcaagtcgagcgagaaatctttcagacgattcttcggatgagtcaggaagatggaaagcggcggacgggtgagtaacgcgtaggcaacctgccctcagcagagggatagccattggaaacgatgattaaaacctcataatgctgaaccaacacatgttggatcagccaaagattta

SEQ ID NO: 337 - DNA, 225 bp, Unknown
  Encodes 16S rRNA from Lachnospiracea incertae sedis
agagtttgatcctggctcaggatgaacgctggcggcgtgcttaacacatgcaagtcgaacgaagcatagtgaatgaagttttcggatggatttcactttgacttagtggcggacgggtgagtaacgcgtgggcaacctgcccttaaccgggggacaacagttggaaacgactgctaataccgcataagcgcacgtgaccgcatggtcgagtgtgaaaaattccgg

SEQ ID NO: 338 - DNA, 225 bp, Unknown
  Encodes 16S rRNA from Prevotella
agagtttgatcatggctcaggatgaacgctagctacaggcttaacacatgcaagtcgaggggcagcatgtcgtgtgcttgcacacgatgatggcgaccggcgcacgggtgagtaacgcgtatccaacctgcccatgaccccgggatagcccgctgaaaagcggattaacaccggatgcggtcgaaagaggacatctgatttcgaccaaagcttttgcggtcatgg

SEQ ID NO: 339 - DNA, 225 bp, Unknown
  Encodes 16S rRNA from Clostridium sensu stricto
agagtttgatcatggctcaggacgaacgctggcggcatgcctaacccatgcaagtcgaacggacgagacgacttcggttgtcaagtcagtggcggacgggtgagtaacacgtgaacaaccaacctcatactgggggacaacatttggaaacgaatgctaataccgcataagaccacagagccgcatggctcagaggtcaaaggagaaatccggtatgagacgggt

SEQ ID NO: 340 - DNA, 225 bp, Unknown
  Encodes 16S rRNA from Victivallis
agagtttgatcctggctcagaacgaacgctggcggcatggattaggcatgcaagtcgaacgaagcagcaatgcttagtggcgcaagggtgaggaacacgtgagtgacctacccgcaagtttggaacagctcctggaaacgggaattaataccggatgtgatcatgaagctgcatggtttcatgattaaagcagcaatgcgcttgcggatgggctcgcgtcccatt

SEQ ID NO: 341 - DNA, 225 bp, Unknown
  Encodes 16S rRNA from unknown taxa
agagtttgatcctggctcaggacgaacgctggcggtgtgcctcatacatgcaagtcgaacgataaggtctcttcggagatacataagtggcggacgggtgagtacaacataggaaatctgccttaaggcgggggacaacagagggaaacttctgctaataccccatatgagctaagctgaaatgcttatcttgaaagctccggcgccttgagatgagcctgtgcc

SEQ ID NO: 342 - DNA, 225 bp, Unknown
  Encodes 16S rRNA from Treponema
agagtttgatcctggctcagaacgaacgctggcggcgcgtcttaagcatgcaagtcgagcgggaataagggagcttgcttccttatgagagcggcggactggtgagtaacacgtgggtaacgcatcctcctgacggggacagcctgtggaaacacagggtaataccggatgagatggacttctggaagggagttcatgaaaggagctacggctccgcagggggaa

SEQ ID NO: 343 - DNA, 225 bp, Unknown
  Encodes 16S rRNA from Stenotrophomonas
agagtttgatcctggctcagagtgaacgctggcggtaggcctaacacatgcaagtcgaacggcagcacaggggagcttgctccccgggtggcgagtggcggacgggtgaggaatgcatcggaatctactctttcgtgggggataacgtagggaaacttacgctaataccgcatacgacctacgggtgaaagcaggggaccttttaggccttgcgcgattgaatga

SEQ ID NO: 344 - DNA, 225 bp, Unknown
  Encodes 16S rRNA from unknown taxa
agagtttgatcatggctcaggatgaacgctagcagaacgcctaacacatgcaagtcgaacgccccgatttatcggggagtggcagacgagcgagtaacacgtacttaacttgcccttgagatgggaacaactgcagagatgtagctaattcccaatatgctcacgatggtgaaatcccaatgtgaggaaagatttatcgctcaaggagaggggtgcgtcctatca

SEQ ID NO: 345 - DNA, 225 bp, Unknown
  Encodes 16S rRNA from Clostridium XlVa
agagtttgatcctggctcaggatgaacgctggcggcgtgcctaacacatgcaagtcgaacgggaacctcacagtggagacttcggtcaaagcagtgagaattctagtggcggatgggtgagtaacgcgtgggtaacctgcctataagaattggataacagtgagaaatcactgctaatacaatataagcttacagtatcgcatgataaagtgagaaaagatttat

SEQ ID NO: 346 - DNA, 225 bp, Unknown
  Encodes 16S rRNA from Sphingobium
agagtttgatcctggctcagagtgaacgctagcggaatgctttatacatgcaagtcgaacggaaaattagaaggagtagcaatacaaatttgaagtttttagtggcgaactggcgagtaatagttaggaacttaccgagtagtgggggacaacagttagaaatgactgctaataccgcatacgcccgagaggggaaagatttatcgctatttgagaggcctaacc

SEQ ID NO: 347 - DNA, 184 bp, Unknown
  Encodes 16S rRNA from Lachnospiracea incertae sedis
agagtttgatcatggctcaggataaacgctggcggcgtgctttggacaatgggggcaaccctgatccagcgacgccgcgtgagcgaagaagtatctcggtatgtaaagctctatcagcagggaagataatgacggtacctgactaagaagcaccggctaaatacgtgccagcagccgcggtaat

SEQ ID NO: 348 - DNA, 225 bp, Unknown
  Encodes 16S rRNA from Oscillibacter
agagtttgatcatggctcaggatgaacgctggcggcgtgcttaacacatgcaagtcgaacggacgaggcggagcttgctctgccgagttagtggcggacgggtgagtaacgcgtgagcaacctgcctttcagagggggacaacgttgggaaaccggcgctaataccgcataatatgcttttgccgcatgacagaagtatcaaaggagcaatccgctgaaagatgg

SEQ ID NO: 349 - DNA, 225 bp, Unknown
  Encodes 16S rRNA from Methylobacterium
agagtttgatcatggctcagagcgaacgctggcggcaggcttaacacatgcaagtcgagcggacctttcggggtcagcggcggacgggtgagtaacgcgtgggaacgtgccttccggttcggaataaccctgggaaactagggctaataccggatacgcccttatggggaaaggtttactgccggaagatcggcccgcgtctgattagctagttggtggggtaac

SEQ ID NO: 350 - DNA, 225 bp, Unknown
  Encodes 16S rRNA from Zhangella
agagtttgatcctggctcagaacgaacgctggcggcatgcttaacacatgcaagtcgaacggtgttgcatagcacttgtgttatgtaacatagtggcaaacgggtgagtaacgcgtggaaacatacccctcagtattggataacgtttggaaacgaacgctaatacaatatacgctcgagagaggaaagagagatcgctgagggagtggtccgcgtcagattaga

SEQ ID NO: 351 - DNA, 225 bp, Unknown
  Encodes 16S rRNA from Lachnospiracea incertae sedis
agagtttgatcctggctcaggatgaacgctggcggcgtgcttaacacatgcaagtcgaacggagttgtttcaccgaatgaactggagagcttgctcaaaggggaattcaccgagacaacttagtggcggacgggtgagtaacgcgtgggtaacctacccttatcagggggataacagtcggaaacgactgctaataccgcataagcgcacagtatcgcatgatac

SEQ ID NO: 352 - DNA, 225 bp, Unknown
  Encodes 16S rRNA from Oscillibacter
agagtttgatcatggctcaggacgaacgctggcggcgtgcctaacacatgcaagtcgaacgaagctcttttcaatgcgattcgtcaagttgaaaggatgacttagtggcgaacgggtgagtaacgcgtgagcaacctgccccggagtgggggacaacagttggaaacgactgctaataccgcatgacatgttcggatggcatcatctgaacatcaaagatttatt

SEQ ID NO: 353 - DNA, 225 bp, Unknown
  Encodes 16S rRNA from Clostridium III
agagtttgatcatggctcaggacgaacgctggcggcgtgcctaacacatgcaagtcgaacgaacttactagcaatagtaagttagtggcggacgggtgagtaatacatgagtaacctgccttatacagggggataacacctagaaatgggtgctaataccgcataataactcagtatggcatcatattgagaggaaaggagcaatccggtaaaagatggactcat

SEQ ID NO: 354 - DNA, 225 bp, Unknown
  Encodes 16S rRNA from Coraliomargarita
agagtttgatcctggctcagagtgaacgctggcggcgtggctaagacatgcaagtcgagcgagaaggtgccttcgggtgccggaaagcggcaaacgggtgcgtaacacgtaagtaacctgcccttaagacgggaacagcttgatgaaaattgagataatgcccgatatccgcttctttcgcatgggagaagtcggaaaggtttgtgatgacgcttaaggaggggc

SEQ ID NO: 355 - DNA, 225 bp, Unknown
  Encodes 16S rRNA from Eubacterium
agagtttgatcatggctcaggattaacgctggcggcgtgcctaacacatgcaagtcgagcgagaagtggtgaaatgaaacttcggtagattggatccatggacagcggcggacgggtgagtaacgcgtgggcaacctgcccctttccggaggatagccaagggaaactttgaataatactccataaagcaagagtaccgcatgatacacttgccaaagatttatc

SEQ ID NO: 356 - DNA, 225 bp, Unknown
  Encodes 16S rRNA from Enterorhabdus
agagtttgatcatggctcaggatgaacgctggcggcgtgcctaacacatgcaagtcgaacggttaaaccgccctcgggcggacatagagtggcgaacgggtgagtaacacgtgaccaacctgccccgcgcaccgggacagccccccgaaagggggattaataccggatactccggggcccccgcatgggggccccgggaaagcccaggcggcgcgggatggggtc

SEQ ID NO: 357 - DNA, 225 bp, Unknown
  Encodes 16S rRNA from Clostridium XlVa
agagtttgatcatggctcaggatgaacgctggcggcgtgcttaacacatgcaagtcgaacgaatttcttattcgcggaggcttcggccgaaggggatatgaagtgagtggcggacgggtgagtaacgcgtgggtaacctgccttacaccgggggataacagagggaaacttctgctaataccgcataagaccacagtgccgcatggtacagaggtaaaagttccg

SEQ ID NO: 358 - DNA, 225 bp, Unknown
  Encodes 16S rRNA from Saccharofermentans
agagtttgatcctggctcaggatgaacgctggcggcgtgcttaacacatgcaagtcgaacgggaagacttttaggaagatttcggttggaataaaagtattctagtggcggacgggtgagtaacgcgtaaacaatctgccttagagagggggataacagatagaaatatttgctaataccgcataagaccacgtttaggcatctagatggggtaaaaggagcaat

SEQ ID NO: 359 - DNA, 225 bp, Unknown
  Encodes 16S rRNA from Clostridium IV
agagtttgatcatggctcaggatgaacgctggcggcgtgcttaacacattcaagtcgaacggacaagagggggcttgctcccttgcgttagtggcggacgggtgagtaacgcgtgagcaacctgcctttctccgggggataacattgggaaaccggtgctaataccgcataacgtacagagatcacatggtcattgtaccaaagatttatcggggaaagatgggc

SEQ ID NO: 360 - DNA, 225 bp, Unknown
  Encodes 16S rRNA from Clostridium sensu stricto
agagtttgatcatggctcaggacgaacgctggcggcgtgcctaacacatgcaagtcgagcggggactgcacgacggatttgaagatttcggttggatatgaagatgtacagttctagcggcggacgggtgagtaacgcgtgagcaacctgtcccttacagggggataacacagcgaaagttgtactaataccgcatgagaccacgatatcacatggtataggggt

SEQ ID NO: 361 - DNA, 225 bp, Unknown
  Encodes 16S rRNA from Victivallis
agagtttgatcctggctcagaacgaacgctggcggcatggattaggcatgcaagtcgaacgaagcagcaatgcttagtggcggaagggtgaggaacgcgtgagtaatctgcccccaagttgggaataacagttggaaacgactgctaataccgaatgtggctgcgaagtcgcatgattttgcagttaaagatttattgcttggggatgagctcgcgtcccattag

SEQ ID NO: 362 - DNA, 225 bp, Unknown
  Encodes 16S rRNA from Coprococcus
agagtttgatcatggctcaggatgaacgctggcggcgtgcttaacacatgcaagtcgaacggagtacttacgctgatgaagcttcggcagagtcttgtaagtacttagtggcggacgggtgagtaacgcgtgggtaacctgccttataccgggggataacgtctggaaacggacgctaataccgcataagcgcacgatgaggcatcttgttgtgtgaaaaactcc

SEQ ID NO: 363 - DNA, 225 bp, Unknown
  Encodes 16S rRNA from Pseudoflavonifractor
agagtttgatcatggctcaggacgaacgctggcggcgtgcttaacacatgcaagtcgaacgaggataatgacttcggttgttattcgagtggcggacgggtgagtaacgcgtgagcaatctgtccttaagagggggataacaactggaaacagttgctaataccgcataagaccacggcctcacatggggctgaggtaaaagaagcaattcgcttaagggtgagc

SEQ ID NO: 364 - DNA, 225 bp, Unknown
  Encodes 16S rRNA from Anaeroplasma
agagtttgatcatggctcaggattaacgctggcggcgtgcctaatacatgcaagtcgaatggttagcttgctaaccatggcgaacgggtgagtaacacgtaggcaacctgtctaagagacgaggataaccattggaaacgatggataatactggataggatataataaggcatcttgttatatttaaagatttatcacttttagaggggcctgcggcgcattagc

SEQ ID NO: 365 - DNA, 225 bp, Unknown
  Encodes 16S rRNA from Anaeroplasma
agagtttgatcatggctcaggattaacgctggcggcgtgcctaatacatgcaagtcgaatggtggtagcaatacaaaccatggcgaacgggtgagtaacacgtaggtaacctatcttactgacgaggataaccgttggaaacgacggataatactggataggacatcataaagggcatccttagatgtttaaaggagcaatccacggtaagaggggcctgcggcg

SEQ ID NO: 366 - DNA, 225 bp, Unknown
  Encodes 16S rRNA from Bacteroides
agagtttgatcctggctcaggatgaacgctagctacaggcttaacacatgcaagtcgaggggcagcattaagtcagcttgctgatttagatggcgaccggcgcacgggtgagtaacgcgtatccaacctgccccctacccggggatagccttgcgaaagtaagattaatacccggtgctgttatgattccgcatgggaatataacgaaagattcatcggtagggg

SEQ ID NO: 367 - DNA, 225 bp, Unknown
  Encodes 16S rRNA from Acinetobacter
agagtttgatcatggctcagattgaacgctggcggcaggcttaacacatgcaagtcgagcggggatagggtgcttgcacctgattcctagcggcggacgggtgagtaatgcttaggaatctgcctattagtgggggacaacgttccgaaagggacgctaataccgcatacgtcctacgggagaaagcaggggatcttcggaccttgcgctaatagatgagcctaa

SEQ ID NO: 368 - DNA, 225 bp, Unknown
  Encodes 16S rRNA from Victivallis
agagtttgatcctggctcagaacgaacgctggcggcatggattaggcatgcaagtcgaacgaagcagcaatgcttagtggcggaagggtgaggaacgcgtgagtaatctgccctcaagttgggaataacagctggaaacggctgctaataccgaatgtggctgttgggtcgcatgatctgacagttaaagatttattgcttgaggatgagctcgcgtcccattag

SEQ ID NO: 369 - DNA, 225 bp, Unknown
  Encodes 16S rRNA from Victivallis
agagtttgatcctggctcagaacgaacgctggcggcatggattaggcatgcaagtcgaacgggtgcagcaatgcaccagtggcgcaagggtgaggaacacgtgagtaatctaccctcaagattgggatagctcctggaaacgggaattaataccggatgaaacagtatgtccgcatggatgtacttttaaagcagcaatgcgcttgaggaggagctcgcgtccca

SEQ ID NO: 370 - DNA, 225 bp, Unknown
  Encodes 16S rRNA from Mogibacterium
agagtttgatcatggctcaggatgaacgctggcggcgtgcctaatacatgcaagtcgagcgagattctgtcagatgagacttcggtggattcagacggatgaaagcggcggacgggtgagtaacgcgtaggcaacctgccccatgcacagggatagccactggaaacggtgattaatacctgataatgcggaccgtatgcatatacggactgccaaagatttatc

SEQ ID NO: 371 - DNA, 225 bp, Unknown
  Encodes 16S rRNA from Oscillibacter
agagtttgatcatggctcaggacgaacgctggcggcgtgcttaacacatgcaagtcgaacggagtgcccttgaaagaggtttcggccaatggaaggggttacttagtggcggactggtgagtaacgcgtgaggaacctgcctttcagagggggacaacagctggaaacggctgctaataccgcatgacacattcgggcggcatcgcctggatgtcaaagatttat

SEQ ID NO: 372 - DNA, 225 bp, Unknown
  Encodes 16S rRNA from Butyricimonas
agagtttgatcctggctcaggatgaacgctagcgacaggcttaacacatgcaagtcgaggggcagcacggcggtggcaacactgctggtggcgaccggcgcactggtgagtaacacgtatgcaacctgccccgcacagggggataatccgcggaaacgcggtctaataccccgtagaacctttggtcgcatgattagaggtggaaagctccggtggtgcgggatg

SEQ ID NO: 373 - DNA, 225 bp, Unknown
  Encodes 16S rRNA from Dethiosulfovibrio
agagtttgatcatggctcaggatgaacgctggcggcgtgcataacacattcaagtcgaacgaagcgccgggacggaacccttcggggggaagacccgatgacttagtggcggacgggtgagtaacgcgtgagcaacctgcctgcgatagagggataacaccgggaaaccggtgctaataccacatgaggcagagaggtcacatggtctttctgttaaagatttat

SEQ ID NO: 374 - DNA, 225 bp, Unknown
  Encodes 16S rRNA from Pseudoflavonifractor
agagtttgatcatggctcaggatgaacgctggcggcgcgcctaacacatgcaagtcgaacggcgaagtcccttcgggggcggaacagtggcggacgggtgagtaacgcgtgagtaacctgcccttacgagcggaatagcgtcgggaaactgacggtaataccgcatgaagcttgaccccggcatcggggagaagccaaagatttatcgcgtaaggatggactcgc

SEQ ID NO: 375 - DNA, 225 bp, Unknown
  Encodes 16S rRNA from Clostridium IV
agagtttgatcatggctcaggatgaacgctggcggcgtgcctaacacatgcaagtcgaacggagctttttatgaacaagacttcggtcaagtaaattctaagcttagtggcggacgggtgagtaacgcgtgagtaacctgcctttcagagggggataacgttcggaaacgaacgctaataccgcataacatagcggaaccgcatgattctgctatcaaagatttt

SEQ ID NO: 376 - DNA, 225 bp, Unknown
  Encodes 16S rRNA from Anaeroplasma
agagtttgatcatggctcaggattaacgctggcggcgtgcctaatacatgcaagtcgaatggttagcttgctaaccatggcgaacgggtgagtaacacgtaggcaacctgtcttacagacgaggataaccgttggaaacgacggataatactggatagtacatcacaatgggcatccatagatgtttaaaggagcaatccactgtaagaggggcctgcggcgcat

SEQ ID NO: 377 - DNA, 225 bp, Unknown
  Encodes 16S rRNA from Oscillibacter
agagtttgatcatggctcaggatgaacgctggcggcgtgcctaacacatgcaagtcgaacggagcttattggaaggagacttcggtcaacggaagataagcttagtggcggacgggtgagtaacgcgtgagcaacctgcctcagagtgggggacaacagctggaaacggctgctaataccgcataacattgcctgaaggcatcttcgggtaatcaaagcttaatg

SEQ ID NO: 378 - DNA, 225 bp, Unknown
  Encodes 16S rRNA from Herbiconiux
agagtttgatcatggctcaggacgaacgctggcggcatgcctaacacatgcaagtcgaacggacggaagtagcaatactgaagttagtggcgaacgggtgagtaacacgtgagcaacctgccctatacactgggatagcagttggaaacgactgataataccggataagaccacgctgtcgcatgacagaggggtcaaagcgctttagcggtatgggatgggctc

SEQ ID NO: 379 - DNA, 225 bp, Unknown
  Encodes 16S rRNA from Eubacterium
agagtttgatcatggctcaggattaacgctggcggcgtgcctaacacatgcaagtcgagcgagaagcagtgaagggagtcttcggacaaacggaactgtggacagcggcggacgggtgagtaacgcgtgggcaacctgcccctttccggaggatagccaagggaaactttgaataatactccataaagcagagatgtcgcatggcaattctgccaaagatttatc

SEQ ID NO: 380 - DNA, 225 bp, Unknown
  Encodes 16S rRNA from unknown taxa
agagtttgatcatggctcaggacgaacgcttgcgacgtgcctaagaaatgcaagtcgagcgatgacgggggcttcggctccttgattagcggcgaacggtcgcgtaacacgtaagcaatctgccccaaagtttgggatagccatccgaaaggatgattaataccggatgtggaatatatatcgcatgttatatattctaaagcagcgatgcgctttgggatgagc

SEQ ID NO: 381 - DNA, 225 bp, Unknown
  Encodes 16S rRNA from Selenomonas
agagtttgatcctggctcaggacgaacgctggcggcgtgcttaacacatgcaagtcgaacgagacgattttaagcttgcttagatgagtcgagtggcaaacgggtgagtaacgcgtagacaacctgccgcaaagatggggacaacagtccgaaaggactgctaataccgaatgttgtcaagtttccgcatgggagcttgattaaagatggcctctacttgtaagc

SEQ ID NO: 382 - DNA, 225 bp, Unknown
  Encodes 16S rRNA from Clostridium IV
agagtttgatcatggctcaggacgaacgctggcggcgtgcttaacacatgcaagtcgaacgaagcttgatttaagatttcttcggaatgattaatgatatgacttagtggcggacgggtgagtaacgcgtgaggaacctgcctttcagagggggacaacatttggaaacgaatgctaataccgcataacgcatttaagggacatcccatagatgccaaagattta

SEQ ID NO: 383 - DNA, 225 bp, Unknown
  Encodes 16S rRNA from Mogibacterium
agagtttgatcatggctcaggatgaacgctggcggcgtgcctaatacatgcaagtcgagcgagaatctcttcagaagcgttttcggacaattccgaggagaggaaagcggcggacgggtgagtaacgcgtaggcaacctgcccttagcagagggatagccattggaaacgatgattaaaacctcataatgctgttgtgacacatgtcagagcagccaaagattta

SEQ ID NO: 384 - DNA, 225 bp, Unknown
  Encodes 16S rRNA from Clostridium IV
agagtttgatcatggctcaggatgaacgctggcggcgtgcctaacacattcaagtcgaacggagaagggggcttcggtcccctgatcagtggcggacgggtgagtaacgcgtgagcaacctgcctttgtgtggggaataacacagggaaacttgtgctaataccgcataacgcatcgacgtagcattacgatgatgccaaagatttattgcacgaagatgggctc

SEQ ID NO: 385 - DNA, 225 bp, Unknown
  Encodes 16S rRNA from Roseburia
agagtttgatcatggctcaggatgaacgctggcggcgtgcttaacacatgcaagtcgaacgaagcgatcctttgtgaagcgaagaagcttgcttcctagtggaactgtggattgacttagtggcggacgggtgagtaacgcgtgggtaacctgcctcacacagggggataacagttagaaatgactgctaataccgcataaaatggcagtgtcgcatgacacaac

SEQ ID NO: 386 - DNA, 225 bp, Unknown
  Encodes 16S rRNA from Anaerovibrio
agagtttgatcatggctcaggacgaacgctggcggcgtgcttaacacatgcaagtcgaacggggcgaagaggagcttgctcttcctagcctagtggcaaacgggtgagtaacgcgtaggcaacctgcccttcagatggggacaacatttcgaaaggaatgctaataccgaatgacgtgcattggtcgcatgaccgatgtaccaaaggccgggcaaccggtcactg

SEQ ID NO: 387 - DNA, 225 bp, Unknown
  Encodes 16S rRNA from Clostridium III
agagtttgatcctggctcaggacgaacgctggcggtatgcttaatacatgcaagtcgaacggagctcagcggaagcttgcttctgcgaaagcttagtggcggacgggtgagtaacgcgtgagtaacctgccttaaagagggggataacacagagaaatctgtgctaataccgcataatgcagcgaagccgcatggctatgctgccaaaggtcagccgctttaaga

SEQ ID NO: 388 - DNA, 225 bp, Unknown
  Encodes 16S rRNA from Saccharofermentans
agagtttgatcatggctcaggacgaacgctggcggcgtgcctaacacatgcaagtcgagcggagatgaggagaagcttgcttcgagacatcttagcggcggacgggtgagtaacgcgtgagcaacctgtcctctgcagggggataagacagcgaaagttgttctaataccgcatgagaccacaacgtcacatggcgaaggggtcaaaggagaaatccggcagagg

SEQ ID NO: 389 - DNA, 225 bp, Unknown
  Encodes 16S rRNA from Saccharofermentans
agagtttgatcatggctcaggatgaacgctggcggcgtgcctaacacatgcaagtcgaacggacgatgaagctcagcttgctgagattcaaagttagtggcggactggtgagtaatgtatgagcaacctgcctttcagaggggaataacacaatgaaagttgtgctaataccgcataatattgtaatattgcatgataatacaatcaaaggagtgatccgctgag

SEQ ID NO: 390 - DNA, 225 bp, Unknown
  Encodes 16S rRNA from Prevotella
agagtttgatcatggctcaggatgaacgctagctacaggcttaacacatgcaagtcgaggggcagcatgggagttgcttgcaattcccgatggcgaccggcgcacgggtgagtaacgcgtatccaaccttcccttaactccggaatagcccgctgaaaggcggattaatgccggatgcggtccagcgagggcatctgacccggaccaaaggattcgtccggttaa

SEQ ID NO: 391 - DNA, 225 bp, Unknown
  Encodes 16S rRNA from Clostridium XlVa
agagtttgatcatggctcaggatgaacgctggcggcgtgcctaacacatgcaagtcgaacggaaatgttctgatgaagtcttcggatagattcattacattttagtggcggacgggtgagtaacacgtgggtaacctgccctgtaccgggggataacacttagaaataggtgataataccgcataagcgcacactgaggcatctcagagtgtgaaaaactccggt

SEQ ID NO: 392 - DNA, 225 bp, Unknown
  Encodes 16S rRNA from Robinsoniella
agagtttgatcctggctcaggatgaacgctagctacaggcttaacacatgcaagtcgagcgatgaataaaccgacaaggtttcggccaaggaagtttattcagagcggcggatgggtgaggaacgcgtggggaacctgcctttcaccgggggataccagctggaaacggctgttaataccgcatatgctcacagtgccgcatggcacagggaggaaaactccggt

SEQ ID NO: 393 - DNA, 225 bp, Unknown
  Encodes 16S rRNA from Brevundimonas
agagtttgatcatggctcaggacgaacgctggcggtgtgcctcatacatgcaagtcgaacgataaggcttcttcggaagtacataagtggcggacgggtgagtacaacataggaaatctgccttagggtgggggacaacagagggaaactcctgctaataccccatatgagctaacttgaaatagttatcttgaaaactccggtgccctaagatgagcctgtgcc

SEQ ID NO: 394 - DNA, 225 bp, Unknown
  Encodes 16S rRNA from Anaerotruncus
agagtttgatcatggctcaggacgaacgctggcggcgcgcttaacacatgcaagtcgaacggagtgtgcttttgaaggtccttcgggaacggatgttgtacacttagtggcggacgggtgagtaacgcgtgagcaacctgcctttcagagggggataacacaacgaaagctgtgctaataccgcatgacattgcgacaccgcatggtgatgcaatcaaaggagca

SEQ ID NO: 395 - DNA, 225 bp, Unknown
  Encodes 16S rRNA from Victivallis
agagtttgatcatggctcagaacgaacgctggcggcatggattaggcatgcaagtcgaacgaagcagcaatgcttagtggcgcaagggtgaggaacacgtgagtgacctacccgcaagtttggaacagctcctggaaacgggaattaataccggatgtgatcgatgaactgcatggtttattgattaaagcagcaatgcgcttgcggatgggctcgcgtcccatt

SEQ ID NO: 396 - DNA, 225 bp, Unknown
  Encodes 16S rRNA from Bacteroides
agagtttgatcctggctcaggatgaacgctagcgacaggcctaacacatgcaagtcgaggggcagcatggttgaagcttgcttcaactgatggcgaccggcgcacgggtgcgtaacgggtgtgcaatttgtcctataccaagggatagcccgctgaaaggcggattaatactttatgtgagtagggggggcatcctctttatttgaaacgtgagggtataggttg

SEQ ID NO: 397 - DNA, 225 bp, Unknown
  Encodes 16S rRNA from Clostridium XlVb
agagtttgatcatggctcaggacgaacgctggcggcgtgcttaatacatgcaagtcgaacgaggtatagcaatataccgagtggcgaacgggtgagtaacacgtgagcaacctgccctatacagggggacaacagctggaaacggctgctaataccgcataagaccacagcaccgcatggtgcaggggtaaaaggctacggtcggtataggatgggctcgcgtac

SEQ ID NO: 398 - DNA, 225 bp, Unknown
  Encodes 16S rRNA from Prevotella
agagtttgatcctggctcaggatgaacgctagctacaggcttaacacatgcaagtcgaggggcatcatgaagtttgcttgcaagctttgatggcgaccggcgcacgggtgcgtaacgcgtatccaatctaccagttactcgggtatagccttgcgaaagtaagattaatccccgatgagtatagttactgcatggtgattatataaaagatttatcggtagctga

SEQ ID NO: 399 - DNA, 225 bp, Unknown
  Encodes 16S rRNA from Ruminococcus
agagtttgatcatggctcaggacgaacgctggcggcacgcttaacacatgcaagtcgaacgagcgaagagagcttgctctccaagctagtggcggacgggtgagtaacacgtgagcaatctgcctttgggtgggggataccagttggaaacgactgttaataccgcataaaatagtaagaccgcatgatcatactatcaaagattcattgcctgaagatgagctc

SEQ ID NO: 400 - DNA, 225 bp, Unknown
  Encodes 16S rRNA from Pelobacter
agagtttgatcctggctcagaattaacgctggcggcgtgcctaacacatgcaagtcgagcgaattcttacagagcatcgtaagagttagcggcaaacgggtgagtaacacatgggaaacctccctcgaaatggggaatatcttcgtgaaaacggagttaataccgcataagaccacagtttggcatcagacaggggtcaaagcagcaatgcgtttcgagatggtc

SEQ ID NO: 401 - DNA, 225 bp, Unknown
  Encodes 16S rRNA from Clostridium XlVa
agagtttgatcatggctcaggatgaacgctggcggcgtgcttaacacatgcaagtcgaacgaatttcttacggatcgcgacttcggtcaagagaagtttgaagtgagtggcggacgggtgagtaacgcgtgggtaacctgccttacaccgggggataacagagggaaacttctgctaataccgcataagaccacagtgccgcatggtacagaggtaaaagttccg

SEQ ID NO: 402 - DNA, 225 bp, Unknown
  Encodes 16S rRNA from Clostridium XlVa
agagtttgatcatggctcaggatgaacgctggcggcgtgcctaacacatgcaagtcgagcggagataagttgaagcctagcgattcttatcttagcggcggatgggtgagtaacacgtgggtaacctgccctgcactggggaataacagctggaaacggctgttaatgccgcatatgcgcacggagccgcatggctttgggcggaaagatttatcggtgcaggat

SEQ ID NO: 403 - DNA, 225 bp, Unknown
  Encodes 16S rRNA from Clostridium XlVb
agagtttgatcatggctcaggatgaacgctggcggcgtgcctaacacatgcaagtcgagcgaagcataggtgcttgcacttatgacttagcggcggacgggtgagtaacgcgtgggtaacctgccctatacagaggaataacagttagaaatgactgctaatgcctcataagccgacgaaatggcatctttttgtcggaaaagatttatcggtataggagggacc

SEQ ID NO: 404 - DNA, 225 bp, Unknown
  Encodes 16S rRNA from Coprococcus
agagtttgatcatggctcaggatgaacgctggcggcgtgcctaacacatgcaagtcgaacgaagtgtcaattcttcggagctgacacttagtggcggacgggtgagtaacgcgtgggtaacctgcctcatacagggggatagcagttggaaacgactgataataccgcataagcgcacagcatcgcatgatgcagtgtgaaaaactccggtggtatgagatggac

SEQ ID NO: 405 - DNA, 225 bp, Unknown
  Encodes 16S rRNA from Clostridium IV
agagtttgatcatggctcaggacgaacgctggcggcgtgcctaacacatgcaagtcgaacggagttattcgaaagcttgcttttggataacttagtggcggacgggtgagtaacgcgtgagtaacctgcctttcagagggggataacgttctgaaaagaacgctaataccgcataatgtataattgtcgcatggcagcgataccaaaggagcaatccgctgaaag

SEQ ID NO: 406 - DNA, 225 bp, Unknown
  Encodes 16S rRNA from Clostridium IV
agagtttgatcctggctcaggatgaacgctggcggcgtgcctaacacatgcaagtcgaacggaacttttaaggaacaagacttcggtcaagtgatatttaagtttagtggcggacgggtgagtaacgcgtgagcaacctgcctctcagagggggataacgtccggaaacggacgctaataccgcataacatggagagatcgcatgatcattccatcaaagatttt

SEQ ID NO: 407 - DNA, 225 bp, Unknown
  Encodes 16S rRNA from Coprococcus
agagtttgatcatggctcaggatgaacgctggcggcgtgcttaacacatgcaagtcgaacgaagcacttacgattgactggagagcttgctcaaagggattttgtttgtgacttagtggcggacgggtgagtaacgcgtgggtaacctgcctcatacagggggataacagttggaaacgactgttaataccgcataagcgcacagtaccgcatggtacagtgtga

SEQ ID NO: 408 - DNA, 225 bp, Unknown
  Encodes 16S rRNA from Victivallis
agagtttgatcctggctcagaacgaacgctggcggcatggattaggcatgcaagtcgaacgaagcagcaatgcttagtggcggaagggtgaggaacgcgtgagcaacctgcccccaagttgggaataacagttggaaacgactgctaataccgaatgtggcttttggaccgcatggtttgatggctaaagatttattgcttggggatgggctcgcgtcccattag

SEQ ID NO: 409 - DNA, 225 bp, Unknown
  Encodes 16S rRNA from Clostridium III
agagtttgatcatggctcaggacgaacgctggcggcgtgcctaacacatgcaagtcgagcggagcttaagaagtcagaagttttcggacggaagacattttaagcttagcggcggacgggtgagtaacgcgtgggcaatctgcccttcacagggggataacacagggaaacttgtgctaataccgcataagatcgtataacggcatcgttaagcgaccaaaggag

SEQ ID NO: 410 - DNA, 225 bp, Unknown
  Encodes 16S rRNA from Anaerovibrio
agagtttgatcctggctcaggacgaacgctggcggcgtgcttaacacatgcaagtcgaacggggcgaagaggagcttgctcttcctagcctagtggcaaacgggtgagtaacgcgtaggcaacctgcccttcagatggggacaacatttcgaaaggaatgctaataccgaatgacgtgcattggtcgcatgaccgatgtaccaaaggccgggcaaccggtcactg

SEQ ID NO: 411 - DNA, 225 bp, Unknown
  Encodes 16S rRNA from Anaerovorax
agagtttgatcctggctcaggatgaacgctggcggcgtgcctaacacatgcaagtcgagcgagaaatcatcagaatgaaacttcggtagatttcagatgatggaaagcggcggacgggtgagtaacgcgtaggcaacctgccctttgcagagggatagccatgggaaactgtgattaaaacctcataacaccattctatcacatgttagaacggtcaaagattta

SEQ ID NO: 412 - DNA, 225 bp, Unknown
  Encodes 16S rRNA from Proteiniclasticum
agagtttgatcatggctcaggacgaacgctggcggcgtgcttaacacatgcaagtcgaacgagggatgaataaagcttgctttgttcatttcgagtggcggacgggtgagtaacgcgtgaggaacctggcttttgcagggggatagcgtcccgaaagagacggtaataccgcataagaccacgctaccgcatggtaaaggggtcaaaggagagatccggcagaag

SEQ ID NO: 413 - DNA, 225 bp, Unknown
  Encodes 16S rRNA from Anaerovorax
agagtttgatcatggctcaggatgaacgctggcggcgtgcctaacacatgcaagtcgagcgagaaacttttgactgacgcttcggttgatttcaaaagcggaaagcggcggacgggtgagtaacgcgtaggcaacctgccctttgcagagggatagcctcgggaaaccgggattaaaacctcataacaccggagtacctcatggtgcaccggtcaaagatttatc

SEQ ID NO: 414 - DNA, 225 bp, Unknown
  Encodes 16S rRNA from Selenomonas
agagtttgatcctggctcaggacgaacgctggcggcgtgcttaacacatgcaagtcgaacgaggtgattgaaagcttgcttttgagaaccgagtggcaaacgggtgagtaacgcgtagacaacctgccgcaaagatggggacaacagtccgaaaggactgctaataccgaatgttgtgcaacttccgcatgggagatgcattaaagatggcctctacttgtaagc

SEQ ID NO: 415 - DNA, 225 bp, Unknown
  Encodes 16S rRNA from Hydrogenoanaerobacterium
agagtttgatcatggctcaggacgaacgctggcggcacgcttaacacatgcaagtcgaacggaacttgggagcttgctttcaagtttagtggcggacgggtgagtaacacgtgagcaacctgcctttcggcggggaataatgattggaaacgatcactaataccccataaaataggtttatcgcatgatagatttatcaaagattcatcaccgaaagatgggctc

SEQ ID NO: 416 - DNA, 225 bp, Unknown
  Encodes 16S rRNA from Acetanaerobacterium
agagtttgatcatggctcaggacgaacgctggcggcgcgcctaacacatgcaagtcgaacggacgaggatccttcgggatccgagttagtggcgaacgggtgagtaacacgtgaggaacctacctttcagagggggataacacttagaaataggtgctaataccgcataagaccacgaccgggcatccggatgaggtcaaaggagcaatccgctgagagacggcc

SEQ ID NO: 417 - DNA, 225 bp, Unknown
  Encodes 16S rRNA from Clostridium XlVa
agagtttgatcctggctcaggatgaacgctggcggcgtgcttaacacatgcaagtcgaacgaagcatgagctgaaattttcggatggatgcccatgacttagtggcggacgggtgagtaacgcgtgggtaacctgcctcatgcagggggacaacagctggaaacggctgctaataccgcataagaccccgtgagcgcatgctcaagaggtaaaagatttatcggc

SEQ ID NO: 418 - DNA, 225 bp, Unknown
  Encodes 16S rRNA from Asaccharobacter
agagtttgatcatggctcaggatgaacgctggcggcgtgcttaacacatgcaagtcgaacgattaaaccggcttcggccggatatagagtggcgaacgggtgagtaacacgtgaccaacctgccccatacttcgggataactcagggaaacttgtgctaataccggatactccgatttgatcgcatggtcttttcgggaaagcctttacggtatgggatggggtc

SEQ ID NO: 419 - DNA, 225 bp, Unknown
  Encodes 16S rRNA from Clostridium XlVa
agagtttgatcatggctcaggatgaacgctggcggcgtgcttaatacatgcaagtcgaacggagatgtccacctgatgaagcagagtgcttgcacaaagcagaatcaaccggatatcttagtggcggacgggtgagtaacgcgtgggtaacctgcctcatactggggaataacagccagaaatgactgctaataccgcataagcgcacagtaccgcatgatacag

SEQ ID NO: 420 - DNA, 225 bp, Unknown
  Encodes 16S rRNA from Lachnospiracea incertae sedis
agagtttgatcctggctcaggatgaacgctggcggcgtgcctaacacatgcaagtcgagcggagtaagacaccggatgaagattcgtctgaatccaccgtcttacttagcggcggatgggtgagtaacgcgtggacaacctgcccttcactgggggataacaaccggaaacgggtgctaataccgcatgggcgcgaacgaccgcatgatcgatcgcgtaaagatt

SEQ ID NO: 421 - DNA, 225 bp, Unknown
  Encodes 16S rRNA from Saccharofermentans
agagtttgatcatggctcaggatgaacgctggcggcgtgcctaacacattcaagtcgaacggagatatacggaagcttgcttttgtatattttagtggcggacgggtgagtaatgcatgagcaacctgccttgaagagggggataacacagagaaatttgtgctaataccgcgtaatctgccgaagcggcatcgcgttggcaggaaaggagcgatccgctttaag

SEQ ID NO: 422 - DNA, 225 bp, Unknown
  Encodes 16S rRNA from Prevotella
agagtttgatcatggctcaggatgaacgctagctacaggcttaacacatgcaagtcgaggggcagcatggcggtggcttgccaccgccgatggcgaccggcgcacgggtgagtaacgcgtatccaacctgcccgcaaccgcggaatagcccgccgaaaggcggattaatgccgcatgagctcgcgcgaggacatctgatcgcgagcaaaggtttttccggttgcg

SEQ ID NO: 423 - DNA, 225 bp, Unknown
  Encodes 16S rRNA from Anaeroplasma
agagtttgatcatggctcaggattaacgctggcggcgtgcctaatacatgcaagtcgaatggttagcttgctaaccatggcgaacgggtgagtaacacgtaggcaacctgtctataagacgaggataaccattggaaacgatggataatactggataggatattgaggggcatcccttaatatttaaagatttatcactaatagaggggcctgcggcgcattagc

SEQ ID NO: 424 - DNA, 225 bp, Unknown
  Encodes 16S rRNA from Spirochaeta
agagtttgatcctggctcagaacgaacgctggcggcgcgtcttaaccatgcaagtcggacggcaaggcgggagcttgctcctgccctagagtggcggactggtgagtaacacgtgggtgacgaaccctgctgactgggatagccgctagaaatagcggataataccggatacggccgtatgtatcagaagcatacggggaaagggagcttaggctccgcaggagg

SEQ ID NO: 425 - DNA, 225 bp, Unknown
  Encodes 16S rRNA from Alkaliphilus
agagtttgatcatggctcaggatgaacgctggcggcgtgcctaacacatgcaagtcgagcgggaaatctttgaatgaaacttcggtcgaatgatgagatggatagcggcggacgggtgagtaacgcgtaggtaagctgccccatgcacagggatagcctagggaaacttggattaatacctgatgacgctgcgaagtcacatgtctttgcagccaaagatctatc

SEQ ID NO: 426 - DNA, 225 bp, Unknown
  Encodes 16S rRNA from Paraprevotella
agagtttgatcatggctcaggatgaacgctagctacaggcttaacacatgcaagtcgaggggcagcatgtcgtgtgcttgcacacgatgatggcgaccggcgcacgggtgagtaacgcgtatccaacctgcccatgactccgggatagcccgctgaaaagcggattaacaccggatggggtcgaacgaggacatctgatttcgaccaaagctttttgcggtcatg

SEQ ID NO: 427 - DNA, 225 bp, Unknown
  Encodes 16S rRNA from Hippea
agagtttgatcatggctcagagttaacgctggcggcgtgcctaacacatgcaagtcgagcgaatttctacagagcatcgtagagattagcggcaaacgggtgagtaacacatgggaaaccttccttagaatggggaatatctccgtgaaaacggagctaataccgcataagaccacagattggcatcaaacaggggtaaaagcagcaatgcgttctaagatggtc

SEQ ID NO: 428 - DNA, 225 bp, Unknown
  Encodes 16S rRNA from Prevotella
agagtttgatcatggctcaggatgaacgctagctacaggcttaacacatgcaagtcgaggggcagcatgaacttagcttgctaagtttgatggcgaccggcgcacgggtgagtaacgcgtatccgaccttccctttgctcggggatagcccagtgaaaactggattaagacccgatgtagtccagctggcgcatgttatctggactaaagatttatcggcagagg

SEQ ID NO: 429 - DNA, 225 bp, Unknown
  Encodes 16S rRNA from Prevotella
agagtttgatcatggctcaggatgaacgctagctacaggcttaacacatgcaagtcgaggggcatcatgcaggttgcttgcaacctgtgatggcgaccggcgcacgggtgcgtaacgcgtatccaaccttccccgcagtagggttcagcccgttgaaagacggattaatcccctatgttgtccattgagggcctctgatttggacgaaagatttatcgctgcggg

SEQ ID NO: 430 - DNA, 225 bp, Unknown
  Encodes 16S rRNA from Hydrogenoanaerobacterium
agagtttgatcatggctcaggacgaacgctggcggcgcgcctaacacatgcaagtcgaacgggactagtgaccggagggtagaaggatctatcttgcgatcactagttcagtggcggacgggtgagtaaagcatgagcaacctggctaatagagggggatagcttttggaaacagaagataataccgcatgaatcagagatttcgcatgaagtttttggaaaagg

SEQ ID NO: 431 - DNA, 225 bp, Unknown
  Encodes 16S rRNA from Clostridium sensu stricto
agagtttgatcatggctcaggacgaacgctggcggcatgcttaacacatgcaagtcgaacggactgattccttcgggatgaaagttagtggcgaacgggtgagtaatgtatgagcaacctgcctctatcaacgggataacagttggaaacgactgctaatacggtataagaccacggcaccgcatgatgctgcggtaaaagatttttcggatagagatgggctca

SEQ ID NO: 432 - DNA, 225 bp, Unknown
  Encodes 16S rRNA from Paraeggerthella
agagtttgatcatggctcaggatgaacgctggcggcgtgcctaacacatgcaagtcgaacggagaacccgccctcgggcggttatgaagtggcgaacgggtgagtaacacgtgaccaacctgccccgcgctcagggacagcctcgggaaaccgggattaatacctgatgcgcccccgcccccgcatgggggaggggggaaagcccaggcggcgcgggatggggtc

SEQ ID NO: 433 - DNA, 225 bp, Unknown
  Encodes 16S rRNA from Clostridium XlVa
agagtttgatcatggctcaggatgaacgctggcggcgtgcttaacacatgcaagtcgaacgaggttgttagaatgaagcagcttgctgtgaatttctagccaccgagtggcggacgggtgagtaacgcgtgggtaacctgccctacagtgggggacaacagttggaaacgactgctaataccgcataagcgcacagtatcgcatgatacagtgtgaaaaactccg

SEQ ID NO: 434 - DNA, 225 bp, Unknown
  Encodes 16S rRNA from Clostridium XlVa
agagtttgatcatggctcaggatgaacgctggcggcgtgcctaacacatgcaggtcgaacgggacctatgtagatcaagacttcggtcaagtgaaatttaggtttagtggcggacgggtgagtaacgcgtgagcaatctgccgtatgcagggggacaacagagggaaacttctgctaataccgcataagcgcacggtatcgcatggtacagtgtgaaaagctccg

SEQ ID NO: 435 - DNA, 225 bp, Unknown
  Encodes 16S rRNA from Clostridium IV
agagtttgatcatggctcaggacgaacgctggcggcgtgcctaacacatgcaagtcgaacggaaatttttcggcagagattcgtcgaagcttaagaattttagtggcggacgggtgagtaacgcgtgagtaacctgccgatgagagtggaataacgttctgaaaagaacgctaataccgcataatatattggagccgcatgactctgatatcaaagattttatcg

SEQ ID NO: 436 - DNA, 225 bp, Unknown
  Encodes 16S rRNA from Clostridium XlVa
agagtttgatcatggctcaggatgaacgctggcggcgtgcctaacacatgcaagtcgaacgaggctctgcgaaatgaagattcgtctgaatttcaaggatgtccgagtggcggatgggtgagtaacgcgtggagaacctgccctatgctgggggataacagctggaaacggttgacaataccgcataagcttctttggtcgcatgaccttggaaggaaagattta

SEQ ID NO: 437 - DNA, 225 bp, Unknown
  Encodes 16S rRNA from Adhaeribacter
agagtttgatcatggctcaggatgaacgctggcggcaggcttaatacatgcaagtcgaacggtaaggtctgaagtagcaatactaaagatacacgagtggcgcacgggtgcgtaacgcgtatgtaatctacccttaaccggaacaaaacagttggaaacgactgctaatattccatagtcattagttaaggcatcttaaagaatgtaaagatttattggttaagg

SEQ ID NO: 438 - DNA, 225 bp, Unknown
  Encodes 16S rRNA from Syntrophococcus
agagtttgatcatggctcaggatgaacgctggcggcgtgcctaacacatgcaagtcgaacgaggctcttttctcagatgtttcgactgaagagagaagatcaccgagtggcggatgggtgagtaacgcgtggagaacctgcccttatcagggggataacaactggaaacggttgacaataccgcatatagtgcttgatcgcatgttcttgcacggaaagatttat

SEQ ID NO: 439 - DNA, 225 bp, Unknown
  Encodes 16S rRNA from Clostridium sensu stricto
agagtttgatcatggctcaggacgaacgctggcggcgtgcttaacacatgcaagtcgaacgaggcaagttccttcggggacttaccgagtggcggacgggtgagtaacgcgtgagcaatctgtcccagacagggggataacaactggaaacagttgctaataccgcataagaccacggagccgcatggctttgaggtaaaaggagcgatccggtttggggtgagt

SEQ ID NO: 440 - DNA, 225 bp, Unknown
  Encodes 16S rRNA from Saccharofermentans
agagtttgatcatggctcaggatgaacgctggcggcgtgcataacacattcaagtcgaacggactgatttgatagcttgctattgatgaaagttagtggcggacgggtgagtaacgcgtgagcaacctgcccctatgtgcgggataacgtttggaaacggacgctaataccgcataatccaattggatcgcatggtctggttggcaaagatttattgcataggga

SEQ ID NO: 441 - DNA, 225 bp, Unknown
  Encodes 16S rRNA from Clostridium IV
agagtttgatcatggctcaggacgaacgctggcggcgtgcctaacacatgcaagtcgaacggagttattcgagatgaagttttcggatggaattttggataacttagtggcggacgggtgagtaacgcgtgagtaacctgcccataagagggggataacgttctgaaaagaacgctaataccgcatgacatatttggttcgcatgaatcgaatatcaaaggagca

SEQ ID NO: 442 - DNA, 225 bp, Unknown
  Encodes 16S rRNA from Clostridium IV
agagtttgatcatggctcaggatgaacgctggcggcgtgcttaacacatgcaagtcgaacgaggttagcggcttcggctgttaaccgagtggcggacgggtgagtaacgcgtgaacaatctgtcctgcaaagggggataccaactggaaacagttgctaataccgcataagaccacggcctcgcatggggctgaggtaaaagcagcgatgcgatgcagggtgagt

SEQ ID NO: 443 - DNA, 225 bp, Unknown
  Encodes 16S rRNA from Clostridium sensu stricto
agagtttgatcctggctcaggacgaacgctggcggcatgcctaacacatgcaagtcgaacgagatagcaatatctagtggcgaacgggtgagtaacacgtgagcaatctgccccatatacagggataacagttagaaatgactgctaataccggataagaccacagcctggcatcgggcaggggtcaaagcgatttagcgatatgggatgagctcgcgtccaatt

SEQ ID NO: 444 - DNA, 225 bp, Unknown
  Encodes 16S rRNA from Coraliomargarita
agagtttgatcctggctcagagtgaacgctggcggcgtggctaagacatgcaagtcgagcgagaaggtgccttcgggtgccggaaagcggcaaacgggtgcgtaacacgtaagtaacctgcccttaagacgggaatagttcgatgaaaattgagataatgcccgatatcaacttctttcgcatggaagaggtttgaaaggtttgtgatgacgcttaaggaggggc

SEQ ID NO: 445 - DNA, 185 bp, Unknown
  Encodes 16S rRNA from Sharpea
agagtttgatcatggctcaggatgaacgctggcggcgtgcttaacacatgcaagttgaacgaggaaggccttcgggtcgtaaagttctgttgcgaaggaagaacgccggagggaggaaatggcctccgggtgacggtacttcgcgagaaagccacggctaactacgtgccagcagccgcggtaat

SEQ ID NO: 446 - DNA, 225 bp, Unknown
  Encodes 16S rRNA from Clostridium IV
agagtttgatcatggctcaggattaacgctggcggcgtgcataacacattcaagtcgaacggagtattgctttcgggtgatactcagtggcggacgggtgagtaacgcgtgagcaatctgccccttattgcgggataacagagagaaatttctgctaatacggcataacgcatcggtatcgcatggtacgggtgccaaagatttatcgatgagggatgagctcgc

SEQ ID NO: 447 - DNA, 225 bp, Unknown
  Encodes 16S rRNA from Anaerovorax
agagtttgatcctggctcaggatgaacgctggcggcgtgcctaacacatgcaagtcgagcgagaaacctgtaattgacgcttcggttgattttacaggcggaaagcggcggacgggtgagtaacgcgtaggcaacctgccctttgcacagggatagcctcgggaaaccgggattaaaacctgatgataccgagacaccacatggtgttccggccaaagatttatc

SEQ ID NO: 448 - DNA, 225 bp, Unknown
  Encodes 16S rRNA from Blautia
agagtttgatcatggctcaggatgaacgctggcggcgtgcctaacacatgcaagtcgaacgggtctaaagttttggaggcttcggccaaagaggctctagattagtggcggacgggtgagtaacgcgtggagaacctgccctgtactgggggataacagtgagaaatcactgctaataccgcataagcgcacgaggccgcatggccctgtgtgaaaaactccggt

SEQ ID NO: 449 - DNA, 225 bp, Unknown
  Encodes 16S rRNA from Clostridium XlVa
agagtttgatcatggctcaggatgaacgctggcggcgtgcctaacacatgcaagtcgaacgagcgagagatgaaacctagtgaatttcgagcgagtggcggacgggtgagtaacgcgtgggtaacctgccttacagagggggataacagtttgaaaagactgctaataccgcataagcacacagtaccgcatggtacagggtgaaaagatttatcactgtaagat

SEQ ID NO: 450 - DNA, 225 bp, Unknown
  Encodes 16S rRNA from Clostridium IV
agagtttgatcatggctcaggatgaacgctggcggcgtgcataacacattcaagtcgaacgaagcaccggcgaggaagtcttcggatggaattgcttttgacttagtggcggacgggtgagtaacgcgtgagcaaccttcctgtttgtgagggataacacagggaaacttgtgctaataccgcatgacgcatgggaatcgcatggtttcgatgccaaagatttat

SEQ ID NO: 451 - DNA, 225 bp, Unknown
  Encodes 16S rRNA from Anaerovorax
agagtttgatcatggctcaggatgaacgctggcggcgtgcctaacacatgcaagtcgagcgggagtatcgcaaacagagattcgtcaaagtgagcgatatgagagcggcggacgggtgagtaacgcgtaggtaacctaccttaagctgagggataacccagggaaacttgggataataccacataacgcggtgaagtcacatggctttaccgccaaagatttatc

SEQ ID NO: 452 - DNA, 225 bp, Unknown
  Encodes 16S rRNA from Coraliomargarita
agagtttgatcctggctcagagtgaacgctggcggcgtggctaagacatgcaagttgagcgagaatataccttcgggtatagggaagcggcaaacgggtgagtaacacgtaagtaacctacccttgagactgggatagctcagcgaaagttgaggtaataccggatgccaaccattaatgcatgttaatggattgaaagggatgagacgatgctcaaggaggggc

SEQ ID NO: 453 - DNA, 225 bp, Unknown
  Encodes 16S rRNA from Lachnospiracea incertae sedis
agagtttgatcctggctcaggatgaacgctggcggcgtgcttaacacatgcaagtcgaacggaacatttcgcccgatgattgagaaagcttgcttcctcctgattcaactgaaatgtttagtggcggacgggtgagtaacgcgtgggtaacctaccttacacagggggataacagttagaaatgactgctaataccgcataagcgcacagtaccgcatggtacag

SEQ ID NO: 454 - DNA, 225 bp, Unknown
  Encodes 16S rRNA from Aquiflexum
agagtttgatcatggctcaggatgaacgctggcggcaggcttaatacatgcaagtcgaacggtaaggcctgaagtggcaacacggagggtacacgagtggcgcacgggtgcgtaacgcgtatgcaacctgcccccaaccgggacaaaacagctggaaacggctgctaatatcccatagtcatgaggaggggcatccctctttatgtaaagattcattggttgggg

SEQ ID NO: 455 - DNA, 225 bp, Unknown
  Encodes 16S rRNA from Pedobacter
agagtttgatcatggctcaggatgaacgctagcggcaggcctaatacatgcaagtcgaacgggaaggggcccttcggggcctctgagagtggcgcacgggtgcgtaacgcgtatgcaaccaaccccgcactgggggacagccggtggaaacgccgggtaataccccatgccgacgggaggggacatccccatccgttgaaaggcttcggtcggtgcgggacgggc

SEQ ID NO: 456 - DNA, 225 bp, Unknown
  Encodes 16S rRNA from Robinsoniella
agagtttgatcctggctcaggatgaacgctggcggcgtgcctaacacatgcaagtcgaacggagtaacaattcttcggaaatgttacttagtggcggacgggtgagtaacgcgtgggtaacctgcctcatacagggggatagcagctggaaacggctgataataccgcataagcgcacagagacgcatgtttcagtgtgaaaaactccggtggtatgagatggac

SEQ ID NO: 457 - DNA, 225 bp, Unknown
  Encodes 16S rRNA from Pelomonas
agagtttgatcatggctcagattgaacgctggcggcatgccttacacatgcaagtcgaacggtaacaggttaagctgacgagtggcgaacgggtgagtaatatatcggaacgtgcccagtcgtgggggataactgctcgaaagagcagctaataccgcatacgacctgagggtgaaagcgggggatcgcaagacctcgcgcgattggagcggccgatatcagatt

SEQ ID NO: 458 - DNA, 225 bp, Unknown
  Encodes 16S rRNA from Saccharofermentans
agagtttgatcatggctcaggatgaacgctggcggcgtgcttaacacatgcaagtcgaacggagtttagtggaatgcgacttcggtcaaatgaaattaaacttagtggcggacgggtgagtaacgtgtgagcaacctgcctttcagagggggataacgcagagaaatttgcgctaataccgcatgacatgtcggaatcgcatggatctgacatcaaaggagcaat

SEQ ID NO: 459 - DNA, 225 bp, Unknown
  Encodes 16S rRNA from Paracoccus
agagtttgatcctggctcagaacgaacgctggcggcaggcctaacacatgcaagtcgagcgaggacttcggtcctagcggcggacgggtgagtaacgcgtgggaacgtgccccttgctgcggaatagccccgggaaactgggattaataccgcatgatccccctgatcatggagatctgggggcaaagatttatcggcaagggatcggcccgcgttggattaggt

SEQ ID NO: 460 - DNA, 225 bp, Unknown
  Encodes 16S rRNA from Enterorhabdus
agagtttgatcatggctcaggatgaacgctggcggcgtgcctaacacatgcaagtcgaacggttaaaccggcttcggccggacatagagtggcgaacgggtgagtaacacgtgaccaacctgccccgcgcaccgggatagccccccgaaagggggattaataccggatgcgccggccgggccgcatggcccggccgggaaagcccaggcggcgcgggatggggtc

SEQ ID NO: 461 - DNA, 225 bp, Unknown
  Encodes 16S rRNA from Beijerinckia
agagtttgatcatggctcagagcgaacgctagcggaatgctttatacatgcaagtcgaacggaaaattaaatgaagtagcaatatggatttgaagtttttagtggcgaacgggtgagtaatatataggaatttgcccagtagtggggaacaacagatagaaatgtctgctaataccgcatacgtccgagaggagaaagtcacaagacgctattggagaagcctat

SEQ ID NO: 462 - DNA, 225 bp, Unknown
  Encodes 16S rRNA from Sporobacter
agagtttgatcctggctcaggacgaacgctggcggcgtgcctaacacatgcaagtcgaacgggatcctcatgaaggagttttcggacaacggaatggggcatctagtggcggacgggtgagtaacgcgtgagcaacctgcccttcggagggggacaacagttggaaacgactgctaataccgcataacatataccggtggcatcatgggtatatcaaagatttat

SEQ ID NO: 463 - DNA, 225 bp, Unknown
  Encodes 16S rRNA from Clostridium IV
agagtttgatcatggctcaggatgaacgctggcggcgtgcataacacattcaagtcgaacggacttagaggggcttgctcctcgaaagttagtggcggacgggtgagtaacgcgtgagcaacctgcctttctccgggggataacattgggaaaccggtgctaataccgcataacgtacagagatcgcatgttttttgtaccaaagattcattggggaaagatggg

SEQ ID NO: 464 - DNA, 225 bp, Unknown
  Encodes 16S rRNA from Bacillus
agagtttgatcctggctcaggatgaacgctggcggcgtgcctaatacatgcaagtcgaacggagtatcttcggatacttagtggcgaacgggtgagtaatacttgaacaacctgcccctttgactgggataaccgtctgaaaagacagctaataccggataggtaatattgaggcatctcgatattattaaagatgggttacatcacattgggatgggttcaagt

SEQ ID NO: 465 - DNA, 225 bp, Unknown
  Encodes 16S rRNA from Saccharofermentans
agagtttgatcctggctcaggacgaacgctggcggcgtgcttaacacatgcaagtcgagcgaggggatacggcttcggctgtagactcgagcggcggacgggtgagtaacgcgtgaacgatctgtcccatacagggggataccacttggaaacaggtgctaataccgcataagaccacgaagctgcatggctttgaggtaaaaggagcgatccggtatggggtga

SEQ ID NO: 466 - DNA, 225 bp, Unknown
  Encodes 16S rRNA from Spirochaeta
agagtttgatcatggctcagaacgaacgctggcggcgcgtcttaagcatgcaagtcgagcgggattgggtagcttgctactcatgagagcggcggactggtgagtaacgcgtgggtgacgtaccctttagacggggatagctcctagaaataggaggtaataccggatacgatagtgagtgtcagaggctcattatgaaaggttcttttgaaccgctgaaggagc

SEQ ID NO: 467 - DNA, 225 bp, Unknown
  Encodes 16S rRNA from Prevotella
agagtttgatcatggctcaggatgaacgctagctacaggcttaacacatgcaagtcgaggggaaacgatgagagagcttgctctctcaggcgtcgaccggcgcacgggtgagtaacacgtatccaacctgcctttttccagggaataaccttgcgaaagtaagactaatgccctatgtgtcctttgacggcatcagacgaggacgaaagatttatcggaaaggga

SEQ ID NO: 468 - DNA, 225 bp, Unknown
  Encodes 16S rRNA from Eubacterium
agagtttgatcatggctcaggattaacgctggcggcgtgcctaacacatgcaagtcgagcgagaaatggtgaaatgaaacttcggtagattagatccatggacagcggcggacgggtgagtaacgcgtgggcaacctgcccctttccggaggatagccaagggaaactttgaataatactccataaagcaagagtaccgcatgatacacttgccaaagatttatc

SEQ ID NO: 469 - DNA, 225 bp, Unknown
  Encodes 16S rRNA from Herbiconiux
agagtttgatcctggctcaggacgaacgctggcggcatgcctaacacatgcaagtcgaacggacgagggtagcaatacccaagttagtggcgaacgggtgagtaacacgtgagcaacctgccctttacactgggatagcagttggaaacgactgataataccggataagaccacgctcccgcatgggagaggggtcaaagtgaattagcggtaaaggatgggctc

SEQ ID NO: 470 - DNA, 225 bp, Unknown
  Encodes 16S rRNA from Brevundimonas
agagtttgatcctggctcagagcgaacgctggcggcaggcctaacacatgcaagtcgaacggacccttcggggttagtggcggacgggtgagtaacacgtgggaacgtgcctttaggttcggaatagctcctggaaacgggtggtaatgccgaatgtgcccttcgggggaaagatttatcgcctttagagcggcccgcgtctgattagctagttggtgaggtaat

SEQ ID NO: 471 - DNA, 225 bp, Unknown
  Encodes 16S rRNA from Mogibacterium
agagtttgatcatggctcaggatgaacgctggcggcgtgcctaatacatgcaagtcgagcgagaatctctgacatgacgcttcggttgattggaagagaggacagcggcggacgggtgagtaacgcgtaggcaacctgcccccgacagagggatagccattggaaacgatgattaaaacctcataacgctcgtatgacacatgtcatatgagccaaagatttatc

SEQ ID NO: 472 - DNA, 225 bp, Unknown
  Encodes 16S rRNA from Anaerorhabdus
agagtttgatcatggctcaggattaacgctggcggcgtgcctaatacatgcaagtcgtacgggtgattctagcttgctagatgatccagtggcgaacgggtgagtaatacataaacaacctacctataaggactgggataacgcttggaaacgagtgctaataccggataggtaacgggagggcatcctcctgttattaaaggattactacacaaatagatgggt

SEQ ID NO: 473 - DNA, 225 bp, Unknown
  Encodes 16S rRNA from Victivallis
agagtttgatcctggctcagaacgaacgctggcggcatggattaggcatgcaagtcgaacgaagcagcaatgcttagtggcggaagggtgaggaacgcgtgagtaatctgcccccaagttgggaataacagctggaaacggctgctaataccgaatgtggctgtcgggtcgcatgatctgacagttaaagatttattgcttggggatgagctcgcgtcccattag

SEQ ID NO: 474 - DNA, 225 bp, Unknown
  Encodes 16S rRNA from Prevotella
agagtttgatcatggctcaggatgaacgctagctacaggcctaacacatgcaagtcgaggggcagcatgggagaagcttgcttttcccgatggcgaccggcgaatgggtgagtcacgcgtgtccaacctgcctccggcccggggatagcccttggaaatgaggattaagacccgataggtggagcttccgcatggcggctccatgaaacgagaccggagatgggg

SEQ ID NO: 475 - DNA, 225 bp, Unknown
  Encodes 16S rRNA from Anaerovorax
agagtttgatcctggctcaggatgaacgctggcggcgtgcctaacacatgcaagtcgagcgggaaatacggaaatgaaggttcgctggaatttctgtatggagagcggcggacgggtgagtaacgcgtaggcaacctgccctttgcagagggatagccactggaaacggtgattaaaacctcataatgccatttgttcacatgttcagatggccaaagatttatc

SEQ ID NO: 476 - DNA, 225 bp, Unknown
  Encodes 16S rRNA from Aquiflexum
agagtttgatcatggctcaggatgaacgctggcggcaggcttaatacatgcaagtcgaacggtaaggcctgaagtggcaacacggagggtacacgagtggcgcacgggtgcgtaacgcgtatgcaacctgcccctaaccgggacaaaacagctggaaacggctgctaatatcccatggccacacgagggggcatccccatgtgtgtaaagattcattggttaggg

SEQ ID NO: 477 - DNA, 225 bp, Unknown
  Encodes 16S rRNA from Oscillibacter
agagtttgatcctggctcaggacgaacgctggcggcgtgcctaacacatgcaagtcgaacggagtgatttggattcgtctggatcacttagtggcggacgggtgagtaacgcgtgagcaacctgcccttcagagggggacaacagttggaaacgactgctaataccgcataatatatacttaaggcatcttaggtatatcaaagattttatcgctgaaggatggg

SEQ ID NO: 478 - DNA, 225 bp, Unknown
  Encodes 16S rRNA from Altererythrobacter
agagtttgatcctggctcagaacgaacgctggcggcacgcttaacacatgcaagtcgaacgagattgcgggttcgctcgtaatttagtggcgcacgggtgaggaacgcgtgactacctgcctgttgatggtggataactccgggaaactggagctaatacagcataagctcgagagaggaaagacaaaagtcgtcgacagagggggttgcgtctgattaggtagt

SEQ ID NO: 479 - DNA, 225 bp, Unknown
  Encodes 16S rRNA from Hydrogenoanaerobacterium
agagtttgatcctggctcaggacgaacgctggcggcacgcttaacacatgcaagtcgaacgaagcttgggagcttgctttcaagcttagtggcggacgggtgagtaacacgtgagcaacctgccttcaggtgtggaataatggttggaaacggccactaataccgcataatgcagcgggatcgcatgatcctgctgccaaaggtttactgcctgaagatgggctc

SEQ ID NO: 480 - DNA, 225 bp, Unknown
  Encodes 16S rRNA from Clostridium III
agagtttgatcatggctcaggacgaacgctggcggcgtgcctaacacatgcaagtcgaacgagaagtcttgaaatgatcccttcggggtgaatggatagatggacagtggcggacgggcgagtaacgcgtgagtaacctgcccataagagagggatagccgatggaaacgtcgagtaatacctcatattgtaattaattcgcatggattgattatgaaagattta

SEQ ID NO: 481 - DNA, 225 bp, Unknown
  Encodes 16S rRNA from Clostridium XlVb
agagtttgatcctggctcaggatgaacgctggcggcgtgcctaacacatgcaagtcgagcgaagcataggtgcttgcacttatgacttagcggcggacgggtgagtaacgcgtgggtaacctgccctgtacaggggaataacagttagaaatgactgctaatgccccataagccgacgtaatggcatctttatgtcggaaaagatttatcggtacaggagggacc

SEQ ID NO: 482 - DNA, 225 bp, Unknown
  Encodes 16S rRNA from Saccharofermentans
agagtttgatcatggctcaggacgaacgctggcggcgtgcctaacacatgcaagtcgagcggggacagcggattagcttgctaagctgctgttccagcggcggacgggtgagtaacgcgtgaacaatctgtcccagacagggggataacacttggaaacaggtgctaataccgcataagaccacagtgccgcatggcagaggggtaaaaggagcaatccggtctg

SEQ ID NO: 483 - DNA, 225 bp, Unknown
  Encodes 16S rRNA from Roseburia
agagtttgatcatggctcaggatgaacgctggcggcgtgcttaacacatgcaagtcgaacgaatttctttcggaacgcggcttcggccaagggaagagagaagtgagtggcggacgggtgagtaacgcgtgggtaacctgcctcacatcgggggataccagtcggaaacgactgctaaaaccgcataagaccacggtatcgcatgatactgaggccaaaactccg

SEQ ID NO: 484 - DNA, 225 bp, Unknown
  Encodes 16S rRNA from Anaeroplasma
agagtttgatcatggctcaggattaacgctggcggcatgcctaatacatgcaagtcgaatgagaagcttgcttctcatggcgaacgggtgagtaacacgtaggtaacctgccttacactcgaggataaccgttggaaacgacggataatactggataggacaaagattcgcatgaatcgttgtttaaaagcaatggtgtatgaggggcctgcggtgcattagcta

SEQ ID NO: 485 - DNA, 225 bp, Unknown
  Encodes 16S rRNA from Planctomyces
agagtttgatcctggctcagaatgaacgttggcggcatggattaggcatgcaagtcgtacggtgaaggggagcttgctcctctgatcagtggcgaaagggatagtaacgcgtagataccaccctcctggacggggatagctgcgggaaactgcaggtaatacccgataatgacgagagtccaaaggtgtaattccttcaggagacggatctgcgtcctaccagat

SEQ ID NO: 486 - DNA, 225 bp, Unknown
  Encodes 16S rRNA from Ruminococcus
agagtttgatcctggctcaggacgaacgctggcggcacgcttaacacatgcaagtcgaacggagataatggatttattcgttatcttagtggcggacgggtgagtaacacgtgagcaacctgcctttaagagggggatagcttctggaaacggatggtaataccctataaaatatatttaaggcatcttaggtatatcaaagatttatcacttaaagatgggctc

SEQ ID NO: 487 - DNA, 225 bp, Unknown
  Encodes 16S rRNA from Selenomonas
agagtttgatcctggctcaggacgaacgctggcggcgtgcttaacacatgcaagtcgaacgagaaaatattggaagcttgcttttgatagattcgagtggcaaacgggtgagtaacgcgtagacaacctgccgcaaagatggggacaacagatcgaaaggtctgctaataccgaatgttgcggagctcccgcatgggagctccgccaaagatggcctctacttgt

SEQ ID NO: 488 - DNA, 225 bp, Unknown
  Encodes 16S rRNA from Anaeroplasma
agagtttgatcatggctcaggattaacgctggcggcgtgcctaatacatgcaagtcgaatggtagtagcaatacaaaccatggcgaacgggtgagtaacacgtaggtaacctgtctttaagacgaggataaccgttggaaacgacggataatactggataggacattacaaggggcatcccaaaatgtttaaagattattatgtcacttagagaggggcctgcgg

SEQ ID NO: 489 - DNA, 225 bp, Unknown
  Encodes 16S rRNA from Anaerovorax
agagtttgatcatggctcaggatgaacgctggcggcgtgcctaacacatgcaagtcgagcgggaaatctcggaaataagcttcggcagaaataagagatggatagcggcggacgggtgagtaacgcgtaggtaacctgccctttgcagagggatagcctagggaaacctggattaataccacataatgcagtctggtcacatggcgaggctgccaaagatttatc

SEQ ID NO: 490 - DNA, 225 bp, Unknown
  Encodes 16S rRNA from Rummeliibacillus
agagtttgatcctggctcaggacgaacgctggcggcgtgcctaatacatgcaagtcgagcgaatgacgagaagcttgcttctctgatttagcggcggacgggtgagtaacacgtgggcaacctgccctgtagactgggataacttcgggaaaccggagctaataccggataattcttttagcctcatggctttaagctaaaaggcgcttcggcgtcactacagga

SEQ ID NO: 491 - DNA, 225 bp, Unknown
  Encodes 16S rRNA from Clostridium XlVa
agagtttgatcctggctcaggatgaacgctggcggcgtgcctaacacatgcaagtcgaacgaggtgcagtaaacggagattcgtcgaagggaactgtatccgagtggcggatgggtgagtaacgcgtggagaacctgcccttatcagggggataacaactggaaacggttgacaataccgcataagcttcggttatcgcatgatagcagaaggaaagatttatcg

SEQ ID NO: 492 - DNA, 225 bp, Unknown
  Encodes 16S rRNA from Anaeroplasma
agagtttgatcctggctcaggattaacgctggcggcgtgcctaatacatgcaagtcgaatggttagcttgctaaccatggcgaacgggtgagtaacacgtaggtaacctgtcttttagccgaggataaccattggaaacgatggataatactggataggacatttgaaggcatctttggatgtttaaagatttatcactagaagaggggcctgcggcgcattagc

SEQ ID NO: 493 - DNA, 225 bp, Unknown
  Encodes 16S rRNA from Butyrivibrio
agagtttgatcctggctcaggatgaacgctggcggcgtgcctaacacatgcaagtcgaacggagtttgtagaacggaagtcttcggatggaagatttataaacttagtggcggacgggtgagtaacgcgtgggtaacctgcctcgtacagggggatagcagctggaaacggctggtaaaaccgcataagcgcacaacttcgcatgaaggagtgtgaaaatattta

SEQ ID NO: 494 - DNA, 225 bp, Unknown
  Encodes 16S rRNA from Lachnospiracea incertae sedis
agagtttgatcctggctcaggatgaacgctggcggcgtgcctaacacatgcaagtcgaacgggaaccttgtgacggagacttcggttgaagaagcaagaattctagtggcggacgggtgagtaacgcgtgggtaacctgcccttaagaggcgaataacagtgagaaatcactgctaatacgccatatgcttacggaatcgcatgattttgtgaggaaaagaattt

SEQ ID NO: 495 - DNA, 225 bp, Unknown
  Encodes 16S rRNA from Anaerotruncus
agagtttgatcatggctcaggacgaacgctggcggcgtgcctaacacatgcaagtcgaacgaagttattacgctgaaatgatattagcttgctaaaggaatttcttgtaatgcttagtggcggacgggtgagtaacgcgtgagcaacctgcctttcagagggggacaacagttggaaacgactgctaataccgcataacattgtttaaagacatctttagataat

SEQ ID NO: 496 - DNA, 225 bp, Unknown
  Encodes 16S rRNA from Syntrophococcus
agagtttgatcctggctcaggatgaacgctggcggcgtgcctaacacatgcaagtcgaacgaggctcttctctctgacgtttcgactgattagagaagatcaccgagtggcggatgggtgagtaacgcgtggagaacctgcccccatcagggggataacaactggaaacggttgataataccgcatatatgacaagaccgcatgatcttgtcaggaaagatttat

SEQ ID NO: 497 - DNA, 225 bp, Unknown
  Encodes 16S rRNA from Paraeggerthella
agagtttgatcctggctcaggatgaacgctggcggcgtgcctaacacatgcaagtcgaacggttaaaccggcttcggccggacataaagtggcgaacgggtgagtaacacgtgaccaacctgccccgcgcaccgggacagccccccgaaagggggattgataccggatgctccgccccctccgcatggcgggggcgggaaagcccaggcggcgcgggatggggtc

SEQ ID NO: 498 - DNA, 225 bp, Unknown
  Encodes 16S rRNA from Papillibacter
agagtttgatcatggctcaggataaacgctggcggcgtgcttaacacattcaagtcgaacggacgacagggggcttgctccctgaagttagtggcggacgggtgagtaacgcgtgagcaacctgccttttttcgggggataacacggggaaaccggtgctaataccgcataacgtaccgagatcgcatggtcatggtaccaaaggagcaatccgaggaaagatgg

SEQ ID NO: 499 - DNA, 225 bp, Unknown
  Encodes 16S rRNA from Lachnospiracea incertae sedis
agagtttgatcctggctcaggatgaacgctggcggcgtgcctaacacatgcaagtcgagcggacttatgacaagattcttcggatgatttttataagttagcggcggatgggtgaggaacgcgtggagaacctgcccttcacagggggataacagttggaaacgactgttaataccgcatatgctcacgtgaccgcatggtcgagtgaggaaagctccggcggtg

SEQ ID NO: 500 - DNA, 225 bp, Unknown
  Encodes 16S rRNA from Prevotella
agagtttgatcctggctcaggatgaacgctagctacaggcttaacacatgcaagtcgaggggcatcaggtactgtgcttgcacagtatgctggcgaccggcgcacgggtgagtaacgcgtatccaaccttcccatgactccggttcagcccgccgaaaggcggattactcccggatggtttccgaagagggcctctgatttggaataaagatttatcggtcatgg

SEQ ID NO: 501 - DNA, 225 bp, Unknown
  Encodes 16S rRNA from Papillibacter
agagtttgatcctggctcaggacgaacgctggcggcgtgcctaacacatgcaagtcgaacggagcgagaggagcttgctcttctcgcttagtggcggacgggtgagtaacgcgtgagcaacctggctttcagaggggaataacacagtgaaaactgtactaataccgcataacgtctcttgggcgcatgcccgagggaccaaaggagcaatccgctgaaagatgg

SEQ ID NO: 502 - DNA, 225 bp, Unknown
  Encodes 16S rRNA from Streptococcus
agagtttgatcctggctcaggatgaacgctggcggcgtgcttaatacatgcaagtcgaacggatgattcttccagcttgctggaagatgattcagtggcgaacgggtgagtaatacgtaggcaacctgccccaaagcgggggatagcagttggaaacgactattaataccgcataggtaatcttaaggcatcttgagattattaaaggtgcgtttgcaccgctgt

SEQ ID NO: 503 - DNA, 225 bp, Unknown
  Encodes 16S rRNA from Methanobrevibacter
agagtttgatcatggcagatgttactgctattgggattcgattaagccatgcaagtcgaacgaatttagattcgtggcgtacggctcagtaacacgtggataacctacccttaggaccgggataaccttgggaaactgaggataatactggataggcaattattcctgtaatggttttttgtttaaatgttttttcgcctaaggatgggtctgcggccgattagg

SEQ ID NO: 504 - DNA, 225 bp, Unknown
  Encodes 16S rRNA from Prevotella
agagtttgatcatggctcaggatgaacgctagctacaggcttaacacatgcaagtcgaggggcatcatggcggtggcttgccaccgctgatggcgaccggcgcacgggtgagtaacgcgtatccaacctgcccccaaccgcggcacagcccgccgaaaggcggattaattccgcatgtggtcgtgatgtgacatcttttcacgactaaaggttcactccggttgg

SEQ ID NO: 505 - DNA, 225 bp, Unknown
  Encodes 16S rRNA from Prevotella
agagtttgatcatggctcaggatgaacgctagctacaggcttaacacatgcaagtcgaggggcagcgagggggcagcaatgcccctgtcggcgaccggcgcacgggtgagtaacgcgtatccaacctgccccatggtagggaatagcccggagaaatccggattaatgccctatgttctccgacgatggcatctgacttggagcaaagatttatcgccatgggat

SEQ ID NO: 506 - DNA, 225 bp, Unknown; identical to SEQ ID NO: 474
  Encodes 16S rRNA from Prevotella

SEQ ID NO: 507 - DNA, 225 bp, Unknown
  Encodes 16S rRNA from Coraliomargarita
agagtttgatcatggctcagagtgaacgctggcggcgtggctaagacatgcaagttgagcgagaatatgcctttgggcatagggaagcggcaaacgggtgagtaacacgtaagtaacctacccttaagactgggatagccctgtgaaagtgggggtaataccggatgaggactatgactgcatggttatagatcgaaaggtttgtaaaggcgcttaaggaggggc

SEQ ID NO: 508 - DNA, 225 bp, Unknown
  Encodes 16S rRNA from Prevotella
agagtttgatcctggctcaggatgaacgctagctacaggcttaacacatgcaagtcgcggggcagcatgttgtgtgcttgcacacaatgatggcgaccggcgcacgggtgcgtaacgcgtatccaacctgccccttactctggaatagcccggcgaaagtcggattaatgccggatgttgtcagatgaggacatctgagtttgaccaaaggccctttgggtcggt

SEQ ID NO: 509 - DNA, 225 bp, Unknown
  Encodes 16S rRNA from Thermotalea
agagtttgatcctggctcaggattaacgctggcggcgtgcctaacacatgcaagtcgagcgagaaatagtgaagagatacttcggttgaacggatctatggacagcggcggacgggtgagtaacgcgtgggcaacctacccctttcccgaggatagccaagggaaactttgaataatactccataaagcagatgtaccgcatgatacgactgccaaagatttatc

SEQ ID NO: 510 - DNA, 225 bp, Unknown
  Encodes 16S rRNA from Clostridium XlVa
agagtttgatcatggctcaggatgaacgctggcggcgtgcttaacacatgcaagtcgaacgaagcaggtttgaaggagacttcggtcaatggatgatctgacttagtggcggacgggtgagtaacgcgtgggcaacctgcctcatggagggggacaacagttggaaacgactgctaataccgcataagaccaagcatcgcatgatgcaatggtaaaagatttatc

SEQ ID NO: 511 - DNA, 225 bp, Unknown
  Encodes 16S rRNA from Atopobium
agagtttgatcatggctcaggatgaacgctggcggcgcgcctaacacatgcaagtcgaacggttaaagccccttcgggggtgtataaagtggcgaacggctgagtaacacgtgggcaacctacctctcactccgggatagcctcgagaaatcgtggataataccggatactccaggataatcgcatggttttcctgggaaagccccgacggtgagagatgggccc

SEQ ID NO: 512 - DNA, 225 bp, Unknown
  Encodes 16S rRNA from Prevotella
agagtttgatcatggctcaggatgaacgctagctacaggcttaacacatgcaagtcgaggggtaacatgacgaaagcttgcttttgttgatgacgaccggcgcacgggtgagtaacgcgtatccaacctgccctgtactacgggatagcccggcgaaagtcggattaataccgtatgtggtgtgataaagacatctgcattacactaaagatttatcggtacagg

SEQ ID NO: 513 - DNA, 225 bp, Unknown
  Encodes 16S rRNA from Mogibacterium
agagtttgatcatggctcaggatgaacgctggcggcgtgcctaatacatgcaagtcgagcgagaagctactttgaagcgttttcgaacaattctgtgtagtggaaagcggcggacgggtgagtaacgcgtaggcaacctgcccttagcagagggatagccattggaaacgatgattaaaacctcataatgccaacttaacacatgttgagctggccaaagattta

SEQ ID NO: 514 - DNA, 225 bp, Unknown
  Encodes 16S rRNA from Clostridium XlVa
agagtttgatcatggctcaggatgaacgctggcggcgtgcttaacacatgcaagtcgaacgaggaattgcgaaagaagttttcggatggattttgcttttccgagtggcggacgggtgagtaacgcgtgggtaacctgccttacactgggggacaacagagagaaatttctgctaataccgcataacccgctatgagcgcatgctcaagacggaaaagatttatc

SEQ ID NO: 515 - DNA, 225 bp, Unknown
  Encodes 16S rRNA from Clostridium XlVa
agagtttgatcctggctcaggatgaacgctggcggcgtgcctaacacatgcaagtcgaacgaagaccccgaggcagagatttcggtcgaagccaagggaggactgagtggcggacgggtgagtaacgcgtggataacctgccccatacagggggatagcagttggaaacgactgataataccgcataagcgcacggggagacatctctttgtgtgaaaagattta

SEQ ID NO: 516 - DNA, 225 bp, Unknown
  Encodes 16S rRNA from Eggerthella
agagtttgatcctggctcaggatgaacgctggcggcgtgcctaacacatgcaagtcgaacggtgaaaccgccctcgggcggacatgaagtggcgaacgggtgagtaacacgtgaccaacctgccccgcgcaccgggacagccccccgaaagggggattaataccggatactccggccgggccgcatggcccggccgggaaagctccggcggcgcgggatggggtc

SEQ ID NO: 517 - DNA, 225 bp, Unknown
  Encodes 16S rRNA from Blautia
agagtttgatcatggctcaggatgaacgctggcggcgtgcctaacacatgcaagtcgaacggagatcatttggaaataagcttcggcagaaagaaggatgatcttagtggcggacgggtgagtaacgcgtggagaacctgccctgtacagggggataacatccagaaatggatgctaaaaccgcataagcgcacatgaccgcatggtcaagtgtgaaaaactccg

SEQ ID NO: 518 - DNA, 225 bp, Unknown
  Encodes 16S rRNA from Vampirovibrio
agagtttgatcatggctcaggacgaacgctggcggtgtgcctcatacatgcaagtcgaacgataaggttccttcgggaatacataagtggcggacgggtgagtacaacataggaaatctgccctaaactgggggacaacagagggaaactcctgctaataccccatacgagcttagttgaaatactaatcttgaaagctccggcggtttaggatgagcctgtgcc

SEQ ID NO: 519 - DNA, 225 bp, Unknown
  Encodes 16S rRNA from Papillibacter
agagtttgatcatggctcaggataaacgctggcggcgtgcttaacacattcaagtcgaacggacgacagggggcttgctccctgaagttagtggcggacgggtgagtaacgcgtgagcaacctgcctttttccgggggataacacggggaaaccggtgctaataccgcataacgtgccgagatcgcatggtcatggtaccaaaggagcaatccggggaaagatgg

SEQ ID NO: 520 - DNA, 225 bp, Unknown
  Encodes 16S rRNA from Beijerinckia
agagtttgatcatggctcagaacgaacgctggcggcaggcttaacacatgcaagtcgaacgccccgcaaggggagtggcagacgggtgagtaacgcgtgggaacataccctttcctgcggaatagctccgggaaactggaattaataccgcatacgccctacgggggaaagatttatcggggaaggattggcccgcgttggattagctagttggtggggtaaagg

SEQ ID NO: 521 - DNA, 225 bp, Unknown
  Encodes 16S rRNA from Bacteroides
agagtttgatcatggctcaggatgaacgctagctacaggcttaacacatgcaagtcgaggggcagcattagattagcttgctaatctagatggcgaccggcgcacgggtgagtaacgcgtatccaacctgccccctacccggggatagccttgcgaaagtaagattaatacccggtgctgttatgattccgcatggggatataacgaaagattcatcggtagggg

SEQ ID NO: 522 - DNA, 225 bp, Unknown
  Encodes 16S rRNA from Desulfotomaculum
agagtttgatcatggctcaggacgaacgctggcggcgtgcttaacacatgcaagtcgaacggagcttaaggaagagcttgctctgagataagcttagtggcggacgggtgagtaacgcgtgaggaacctggtttacacagggggataacggcccgaaagggttgctaataccgcataagaccacaacaccgcatgatgaaggggtcaaaggagaaatccggtgta

SEQ ID NO: 523 - DNA, 225 bp, Unknown
  Encodes 16S rRNA from unknown taxa
agagtttgatcatggctcaggataaacgctggcggcgtgcattatgcatgcaagtcgaacgagatacgcaagtatcgagtggcaaacgggtgagtaacacatagataacctaccctcgagtggggaataattctccgaaaggaggactaataccgcatacgatggcttttcacaagaagagttattaaagcagcaatgcgcttgaggaggggtctgtgtccgatt

SEQ ID NO: 524 - DNA, 225 bp, Unknown
  Encodes 16S rRNA from Clostridium XlVa
agagtttgatcatggctcaggatgaacgctggcggcgtgcttaacacatgcaagtcgaacgaatttctgttagaatgcggcttcggccaagtgaagacagaagtgagtggcggacgggtgagtaacgcgtgggtaacctaccttacacagggggataacgattggaaacgatcgctaataccgcataagaccacagtgccgcatggtacaggggtaaaagattta

SEQ ID NO: 525 - DNA, 225 bp, Unknown
  Encodes 16S rRNA from Clostridium XlVa
agagtttgatcatggctcaggatgaacgctggcggcgtgcctaacacatgcaagtcgaacgggcactggcggaagaagccttcgggtggaagctgccagagctagtggcggacgggtgagtaacgcgtggataacctgccctgttccgggggataacagctggaaacggctgctaataccgcataagcgcacgaggcggcatcgcctagtgtgaaaaactccggt

SEQ ID NO: 526 - DNA, 225 bp, Unknown
  Encodes 16S rRNA from Clostridium XlVa
agagtttgatcatggctcaggatgaacgctggcggcgtgcctaacacatgcaagtcgaacggaaatgatttgatgaaggtttcggttggattcttatcattttagtggcggacgggtgagtaacacgtgggtaacctgccctgtaccgggggataacacttagaaataggtgataataccgcataagcgcacactgacgcatgtcagagtgtgaaaaactccggt

SEQ ID NO: 527 - DNA, 225 bp, Unknown
  Encodes 16S rRNA from Cryptanaerobacter
agagtttgatcatggctcaggacgaacgctggcggcatgcctaacacatgcaagtcgaacggaataagtttggttgtagcgatactttcgaacttatttagtggcgaacgggtgagtaacacgtgagcaacctgccttttacacagggataacagccggaaacggctgctaataccggataagaccacaccgaggcatctcggaggggtcaaagcgcttagcggt

SEQ ID NO: 528 - DNA, 225 bp, Unknown
  Encodes 16S rRNA from Prevotella
agagtttgatcatggctcaggatgaacgctagctacaggcctaacacatgcaagtcgaggggcagcatgtcggtagcttgctaccgatgatggcgaccggcggatgggtgagcaacgcgtatccaacctgccccatgcgcggggatagcccttggaaatgaggattaagccccgatatgcgcattcgccgcatggcgtgtgcgtgaagttgtgcatgggatgggg

SEQ ID NO: 529 - DNA, 225 bp, Unknown
  Encodes 16S rRNA from Syntrophomonas
agagtttgatcatggctcaggacgaacgctggcggcgtgcctaacacatgcaagtcgaacggaaactattcgagaatttcggttcatgaatagttttagtggcggacgggtgagtaacgcgtgagaatctgcctttgagtggggaataacagttggaaacgactgctaataccgcataacatggaaacatcaaagagggtgcaagccctcgctcagagatgagct

SEQ ID NO: 530 - DNA, 225 bp, Unknown
  Encodes 16S rRNA from Erysipelothrix
agagtttgatcatggctcaggatgaacgctggcggcgtgcttaatacatgcaagtcgaacgcacgagattacttcggtgatcgagtgagtggcgaacgggtgagtaatacataaggaacctgcccatcagactgggataacagttggaaacgactgctaataccggataggtagttgagtggcatcacatagctattaaagttgagatacactgatggatggcct

SEQ ID NO: 531 - DNA, 225 bp, Unknown
  Encodes 16S rRNA from Selenomonas
agagtttgatcctggctcaggacgaacgctggcggcgtgcttaacacatgcaagtcgaacgagacgattgaaagcttgcttttgaaagtcgagtggcaaacgggtgagtaacgcgtaggcaacctgcctctaggatggggacaacagtccgaaaggactgctaataccgaatgttgtaggtattccgcatggaatacctattaaagatggcctctacttgtaagc

SEQ ID NO: 532 - DNA, 225 bp, Unknown
  Encodes 16S rRNA from Clostridium III
agagtttgatcatggctcaggacgaacgctggcggcgtgcctaacacatgcaagtcgagcgagaatctttcatttgatcccttcggggtgacgacggaagaggaaagcggcggacgggtgagtaacgcgtgagtaatctgccccatggtggggaataacacagtgaaaactgtgctaatgccccataatgtatacttgttgcatagcagggataccaaagattta

SEQ ID NO: 533 - DNA, 225 bp, Unknown
  Encodes 16S rRNA from Flavobacterium
agagtttgatcctggctcaggatgaacgctagcggcaggcctaacacatgcaagtcgaggggtagagatagcttgctatcttgagaccggcgcacgggtgcgtaacgcgtatgcaatctaccttatactaagggatagcccggagaaatccggattaataccttatggtttttatgaatagcattatttatagaataaagatttatcggtataagatgagcatgc

SEQ ID NO: 534 - DNA, 225 bp, Unknown
  Encodes 16S rRNA from Thermotalea
agagtttgatcctggctcaggatgaacgctggcggcgtgcttaacacatgcaagtcgagcgagaaatgacagacggattcttcggatgacagaagtcatggacagcggcggacgggtgagtaacgcgtgggcaacctgcccctgactgagggatagccgagggaaacttcgagtaatacctcataacgcataactgtcgcatggcagatatgccaaagatttatc

SEQ ID NO: 535 - DNA, 225 bp, Unknown
  Encodes 16S rRNA from Lachnospiracea incertae sedis
agagtttgatcatggctcaggatgaacgctggcggcgcgcttaacacatgcaagtcgaacggaatttgtaacttcggttgtggattcagtggcggacgggtgagtaacacgtggataacttgccttttagtgggggatagctgagagaaatctcaattaataccgcataatgtaatttgttcgcatgaatagattaataaagatgaaaatcgctaagagataggt

SEQ ID NO: 536 - DNA, 225 bp, Unknown
  Encodes 16S rRNA from Mucilaginibacter
agagtttgatcatggctcaggatgaacgctagcggcaggcctaatacatgcaagtcggacgggaactccccttcgggggagtgagagtggcgcacgggtgcgtaacgcgtatgcaaccaaccctcatccgggggacagccggtggaaacgccgggtaataccccatgtccactttgggaggcatcttctgaggtggaaagactttggtcggaggaggacgggcat

SEQ ID NO: 537 - DNA, 225 bp, Unknown
  Encodes 16S rRNA from Bacteroides
agagtttgatcctggctcaggatgaacgctagctacaggcttaacacatgcaagtcgaggggcagcattagattagcttgctaatctagatggcgaccggcgcacgggtgagtaacgcgtatccaacctgccccctacccggggatagccttgcgaaagtaagattaatacccggtgctgttgcgattccgcatggggatgcaacgaaagattcatcggtagggg

SEQ ID NO: 538 - DNA, 225 bp, Unknown
  Encodes 16S rRNA from Ruminococcus
agagtttgatcctggctcaggacgaacgctggcggcacgcttaacacatgcaagtcgaacggagttaaataagcttgcttatttaacttagtggcggacgggtgagtaacacgtgagcaacctgccttacagagaggaataatgattggaaacggtcactaatacctcataaaatatctatactgcatggtattggatatcaaagatttatcgctgtaagatggg

SEQ ID NO: 539 - DNA, 191 bp, Unknown
  Encodes 16S rRNA from Clostridium XlVa
agagtttgatcatggctcaggatgaacgctagctacaggcttaacacatgcaagtcgaggggaaaccctgatgcagcgacgccgcgtgagtgaagaagtatttcggtatgtaaagctctatcagcagggaagaaaatgacggtacctgactaagaagccccggctaactacgtgccagcagccgcggtaat

SEQ ID NO: 540 - DNA, 225 bp, Unknown
  Encodes 16S rRNA from Asaccharobacter
agagtttgatcctggctcaggatgaacgctggcggcgtgcttaacacatgcaagtcgaacgattaagacccttcggggtgaataaagtggcgaacgggtgagtaacacgtgaccaacctgcctcgcactccggaataccttgtggaaacgcaaactaataccggatactccgagctgagcgcatgctctactcgggaaagcctttacggtgcgagatggggtcgc

SEQ ID NO: 541 - DNA, 225 bp, Unknown
  Encodes 16S rRNA from Blautia
agagtttgatcatggctcaggatgaacgctggcggcgtgcctaacacatgcaagtcgaacggggatatgtcggaatgagacttcggttgaaggaagacatatcttagtggcggacgggtgagtaacgcgtggagaacctgcctcatactgggggataccagtgagaaatcactgctaaaaccgcataagcgcacggtaccgcatggtacagtgtgaaaaactccg

SEQ ID NO: 542 - DNA, 225 bp, Unknown
  Encodes 16S rRNA from Mucilaginibacter
agagtttgatcatggctcaggatgaacgctagcggcaggcctaatacatgcaagtcggacgggatctccccttcgggggagtgagagtggcgcacgggtgcgtaacgcgtatgcaaccaaccctcatccgggggacagccggtggaaacgccgggtaataccccatatccacttcgggaggcatcttctgaggtggaaaggctttggtcggaggaggacgggcat

SEQ ID NO: 543 - DNA, 225 bp, Unknown
  Encodes 16S rRNA from Coprococcus
agagtttgatcatggctcaggatgaacgctggcggcgtgcttaacacatgcaagtcgaacggacttaaggcgctgacgagacttcggtcaaatcttgtcttaagttagtggcggacgggtgagtaacgcgtgggtaacctgccgtatgccgggggacaacagttggaaacgactgctaataccgcataagcgcacggggaggcatctttccgtgtgaaaaactcc

SEQ ID NO: 544 - DNA, 225 bp, Unknown
  Encodes 16S rRNA from Lachnospiracea incertae sedis
agagtttgatcctggctcaggatgaacgctggcggcgtgcttaacacatgcaagtcgaacggaacattccacccgaagaatgaagaagcttgcttcggaatgattcaaccggaatgtttagtggcggacgggtgagtaacgcgtgggtaacctaccttacacagggggataacagttagaaatgactgctaataccgcataagcgcacagtaccgcatggtacgg

SEQ ID NO: 545 - DNA, 225 bp, Unknown
  Encodes 16S rRNA from Butyricimonas
agagtttgatcatggctcaggatgaacgctagcggcaggcttaacacatgcaagtcgaggggcagcgggtctagcaatagatgccggcgaccggcgaaagggtgagtaacgcgtgagcaacatacccttgacagggggataggcactggaaacggtgtgtaataccccgtaatacattccatcgcatggtggggtgttgaaagattcattggtcaaggattggct

SEQ ID NO: 546 - DNA, 225 bp, Unknown
  Encodes 16S rRNA from Lachnospiracea incertae sedis
agagtttgatcatggctcaggatgaacgctggcggcgtgcttaacacatgcaagtcgaacgaagctcctgcgcagatcccttcggggtgaagcaagggaagacttagtggcggacgggtgagtaacgcgtgggtaacctgccatatacagggggataacagttagaaatgactgctaataccccataagcgcacagtaaggcatcttacagtgtgaaaagccttt

SEQ ID NO: 547 - DNA, 225 bp, Unknown
  Encodes 16S rRNA from Treponema
agagtttgatcatggctcagaacgaacgctggcggcgcgtcttaagcatgcaagtcggacgggatatggtagcttgctaccattgagagtggcggactggtgagtaacgcgtgggtgacgtaccctggtgaccgggacagctcctagaaataggaggtaataccggatacgctggatgctgtcagagggcattcaggaaagcagcttttgctgcgcacgaggagc

SEQ ID NO: 548 - DNA, 225 bp, Unknown
  Encodes 16S rRNA from Clostridium sensu stricto
agagtttgatcctggctcaggacgaacgctggcggcgcgcctaacacatgcaagtcgaacgggactagtgactagagtcaagaagttttcttggttctattcactagttcagtggcggacgggtgagtaaagcatgagtaacttgcccattagtggggaatagcttttggaaacagaagataataccgcatacatcggtttggacacatgttcggaccggaaaag

SEQ ID NO: 549 - DNA, 225 bp, Unknown
  Encodes 16S rRNA from Clostridium XlVa
agagtttgatcctggctcaggatgaacgctggcggcgtgcctaacacatgcaagtcgagcggagatagaacaccggatgaagattcgtcggaatccaccgttttatcttagcggcggatgggtgagtaacgcgtggataacctgcccttcacagggggataacaaccggaaacgggtgctaataccgcatgggcgcagggggccgcatggttcccggcgtaaaga

SEQ ID NO: 550 - DNA, 225 bp, Unknown
  Encodes 16S rRNA from Anaerovorax
agagtttgatcatggctcaggatgaacgctggcggcgtgcctaacacatgcaagtcgagcgagaaaggacgaagcagcttgctgcagagtcccggacagcggcggacgggtgagtaacgcgtaggtaagctgccccttgcaggaggatagcctcgggaaaccgggattaatacttcataacgcgtttttatcgcatggtgaaaacgccaaagatttatcggcaag

SEQ ID NO: 551 - DNA, 225 bp, Unknown
  Encodes 16S rRNA from Saccharofermentans
agagtttgatcctggctcaggacgaacgctggcggcgtgcctaacacatgcaagtcgagcggggacactggaggagcttgcttcactggtgttctagcggcggacgggtgagtaacgcgtgaacaatctgtcccggacagggggataacacttggaaacaggtgctaataccgcataagcccacggtaccgcatggtacagggggaaaaggagcgatccggttcg

SEQ ID NO: 552 - DNA, 225 bp, Unknown
  Encodes 16S rRNA from Clostridium XlVa
agagtttgatcatggctcaggatgaacgctggcggcgtgcctaacacatgcaagtcgaacgaagttgtttccacccgacagattatcttcggatatgaagtcaccggaaacgcttagtggcggacgggtgagtaacgcgtgggcaacctgccctacacagggggatagcggttggaaacgaccggtaataccgcatacctttattgaaccgcatgatttaataaa

SEQ ID NO: 553 - DNA, 225 bp, Unknown
  Encodes 16S rRNA from Clostridium III
agagtttgatcatggctcaggataaacgctggcggcgcacataagacatgcaagtcgaacggacgattattaattcttcacgatttaataaaagttagtggcggactggtgagtaacgcgtgagcaacctacctattagaggggaataacgaagagaaattttcgctaataccgcataagctgaaggaatcgcatgattcagtcagaaaaggagcaatccgctaa

SEQ ID NO: 554 - DNA, 225 bp, Unknown
  Encodes 16S rRNA from Clostridium IV
agagtttgatcatggctcaggatgaacgctggcggcgtgcataacacattcaagtcgaacgggcgagagggcttcggtcctcaagtcagtggcggacgggtgagtaacgcgtgagcaacctgcccctatgtgcgggataaccttcggaaacggatgctaataccgcatgaaccaacgggatcgcatggtccagttggcaaagatttattgcatagggatgggctc

SEQ ID NO: 555 - DNA, 225 bp, Unknown
  Encodes 16S rRNA from Ruminococcus
agagtttgatcatggctcaggacgaacgctggcggtatgcttaatacatgcaagtcgaacggagctcagcggaagcttgcttctgcgaaagcttagtggcggacgggtgagtaacgcgtgagtaacctgccttaaagagggggataacacagagaaatctgtgctaataccgcataatgcagcacagccgcatgactatgctgccaaaggtcagccgctttaaga

SEQ ID NO: 556 - DNA, 225 bp, Unknown
  Encodes 16S rRNA from Clostridium XlVa
agagtttgatcctggctcaggatgaacgctggcggcgtgcctaacacatgcaagtcgaacggaaaggattcttcggaattctttcagtggcggacgggtgagtaacgcgtgggtaacctgccccatacaggggaacaacagctggaaacggctgctaataccgcataagcgcacagtactgcatggtacagtgtgaaaagattttatcggtatgggatggacccg

SEQ ID NO: 557 - DNA, 225 bp, Unknown
  Encodes 16S rRNA from Clostridium XI
agagtttgatcatggctcaggacgaacgctggcggcgtgcttaacacatgcaagtcgaacgaggtttactgaagagcttgctctgaggtagaccgagtggcggacgggtgagtaacgcgtgaggaacctgtcttacacagggggataacgcaccgaaaggtgtgctaataccgcataagaccacactttcgcatggaagaggggtcaaaggagcgatccggtgta

SEQ ID NO: 558 - DNA, 225 bp, Unknown
  Encodes 16S rRNA from Clostridium XlVa
agagtttgatcatggctcaggatgaacgctggcggcgtgcctaacacatgcaagtcgagcggagttacataagcttgcttttgtaacttagcggcggatgggtgaggaacgcgtggataacctgcctcgcactgggggataacagctggaaacggctgttaataccgcatatgctcacggtaccgcatggtacagggaggaaagatttatcggtgcgagatggat

SEQ ID NO: 559 - DNA, 225 bp, Unknown
  Encodes 16S rRNA from Eubacterium
agagtttgatcatggctcaggattaacgctggcggcgtgcctaacacatgcaagtcgagcgagaaatggtgaagagaaacttcggttgaacagatccatggacagcggcggacgggtgagtaacgcgtgggcaacctgcccctttccggaggatagccaagggaaactttgaataatactccataaagcaagagtaccgcatgatacacttgccaaagatttatc

SEQ ID NO: 560 - DNA, 225 bp, Unknown
  Encodes 16S rRNA from Lachnospiracea incertae sedis
agagtttgatcatggctcaggatgaacgctggcggcgcgcttaacacatgcaagtcgaacggaatttatagcttcggttgtgaattcagtggcggacgggtgagtaacacgtggataacttgccttttagtgggggatagctgagagaaatctcaattaataccgcataaagtaatttattcgcatgaatagattaataaagatgaaaatcgctaaaagataggt

SEQ ID NO: 561 - DNA, 225 bp, Unknown
  Encodes 16S rRNA from Clostridium IV
agagtttgatcatggctcaggatgaacgctggcggcgtgcataacacattcaagtcgaacgaagcattaagacggaagccttcgggtggaagatttaatgacttagtggcggacgggtgagtaacgcgtgagcaaccttcctgcctgtgagggataacacagggaaacttgtgctaataccgcataaagcatttgagtcgcatggtttaggtgccaaagatttat

SEQ ID NO: 562 - DNA, 225 bp, Unknown
  Encodes 16S rRNA from Ruminococcus
agagtttgatcatggctcaggacgaacgctggcggcacgcttaacacatgcaagtcgaacggtgacggcaacaagcttgcttgttgcaagatcagtggcggacgggtgagtaacacgtgagcaatctgccttcgggtgggggataccagttggaaacgactgttaataccgcataacatgatagaaccgcatgattttatcatcaaagatttattgcctgaagat

SEQ ID NO: 563 - DNA, 225 bp, Unknown
  Encodes 16S rRNA from Clostridium IV
agagtttgatcctggctcaggacgaacgctggcggcgtgcctaacacatgcaagtcgaacggagttattcgagatgaagttttcggatggaattttggataacttagtggcggacgggtgagtaacgcgtgagtaacctgcccataagagggggataacgttctgaaaagaacgctaataccgcataatatatttggttcgcatgaaccgaatatcaaaggagca

SEQ ID NO: 564 - DNA, 225 bp, Unknown
  Encodes 16S rRNA from Faecalibacterium
agagtttgatcatggctcaggataaacgctggcggcgcacataagacatgcaagtcgaacggacccaaatcattcattacgattgatggaaggttagtggcggactggtgagtaacgcgtgagcaacctacctataagaggggaataacagagagaaatttctgctaataccgcataagctgaaagaatcgcatgatttagtcagaaaaggagcaatccgcttat

SEQ ID NO: 565 - DNA, 225 bp, Unknown
  Encodes 16S rRNA from Anaerovibrio
agagtttgatcatggctcaggacgaacgctggcggcgtgcttaacacatgcaagtcgaacggagtgaaggggagcttgctccttggaacttagtggcaaacgggtgagtaacgcgtaggcaacctgcccttcagatggggacaacatttcgaaaggaatgctaataccgaatgacgtgcattggtcgcatgaccgatgtaccaaaggccgggcaaccggtcactg

SEQ ID NO: 566 - DNA, 225 bp, Unknown
  Encodes 16S rRNA from Asaccharobacter
agagtttgatcctggctcaggatgaacgctggcggcgtgcctaacacatgcaagtcgaacggttaagccggcttcggccgggtatagagtggcgaacgggtgagtaacacgtgaccaacctgccccgcgccccgggatagcctcgtgaaaacgggattaacaccggatgcgccgcgggccccgcatggggcccgcgggaaagcttggcggcgcgggatggggtcg

SEQ ID NO: 567 - DNA, 225 bp, Unknown
  Encodes 16S rRNA from Pelotomaculum
agagtttgatcctggctcaggacaaacgctggcggcgtgcttaacacatgcaagtcgtacggagctgcaggacggaatccttcgggaggaagaacggcagcttagtggcggacgggtgagtaacgcgtgagcaacctgcccataagagggggataacagttggaaacgactgctaataccgcataagaccacaacaccgcatggtggaggggtcaaagagcaatc

SEQ ID NO: 568 - DNA, 225 bp, Unknown
  Encodes 16S rRNA from Spirochaeta
agagtttgatcatggctcagaacgaacgctggcggcgcgtcttaagcatgcaagtcgagcgggaaggtgtagcttgctacgccggagagcggcggactggtgagtaacacgtgggtaacgcacccttctgacggggacagcctgtggaaacacagggtaataccggatgagatgtgcttctggaagggggcacatgaaaggagctacggctccgcagggggaacg

SEQ ID NO: 569 - DNA, 225 bp, Unknown
  Encodes 16S rRNA from Prevotella
agagtttgatcatggctcaggatgaacgctagctacaggcttaacacatgcaagtcgaggggcagcatgtcgtgtgcttgcacacgatgatggcgaccggcgcacgggtgagtaacgcgtatccaacctgcccatgactccgggatagcccgctgaaaagcggattaacaccggatgtggtcgaaagaggacatctgatttcgaccaaagcttcggcggtcatgg

SEQ ID NO: 570 - DNA, 225 bp, Unknown
  Encodes 16S rRNA from Lachnospiracea incertae sedis
agagtttgatcatggctcaggatgaacgctggcggcgtgcttaacacatgcaagtcgaacgaagcacctctcccgaagattgaagtagcttgctacggattgattcatttgaggtgacttagtggcggacgggtgagtaacgcgtgggtaacctgcctcatagagggggacaacagttggaaacgactgctaataccgcataacatgtgactgtcacatgacaga

SEQ ID NO: 571 - DNA, 225 bp, Unknown
  Encodes 16S rRNA from Anaerovorax
agagtttgatcatggctcaggatgaacgctggcggcgtgcttaacacatgcaagtcgagcgagaaacctacagatgacgcttcggttgattcagtaggcggaaagcggcggacgggtgagtaacgcgtaggcaacctgcccctggcagagggatagcatcgggaaactgatattaagacctcataacgcatcgatatcacatgataatgatgccaaagatttatc

SEQ ID NO: 572 - DNA, 225 bp, Unknown
  Encodes 16S rRNA from Clostridium IV
agagtttgatcatggctcaggattaacgctggcggcgtgcataacacattcaagtcgaacggacgaagcccttcggggcctagttagtggcggacgggtgagtaacgcgtgagcaacctgcccttatgtgggggataacgaccggaaacggtcgctaataccgcatgacccgatagtatcgcatgatacagtcggcaaagatttattgcataaggatgggctcgc

SEQ ID NO: 573 - DNA, 225 bp, Unknown
  Encodes 16S rRNA from Victivallis
agagtttgatcctggctcagaacgaacgctggcggcatggattaggcatgcaagtcgaacgaggtagcaataccgagtggcggaagggtgaggaacgcgtgagtaatctgccccctagttgggaataacagttggaaacgactgctaataccgaatgtggctttcaggtcgcatgacttgaaggctaaagatttatcgctaggggatgagctcgcgtcccattag

SEQ ID NO: 574 - DNA, 184 bp, Unknown
  Encodes 16S rRNA from Syntrophococcus
agagtttgatcatggctcaggatgaacgctggcggcgtgctttgcacaatgggggaaaccctgatgcagcgacgccgcgtgagtgatgaagtatttcggtatgtaaagctctatcagcagggaagaagatgacggtacctgagtaagaagccccggctaactacgtgccagcagccgcggtaat

SEQ ID NO: 575 - DNA, 225 bp, Unknown
  Encodes 16S rRNA from Syntrophococcus
agagtttgatcctggctcaggatgaacgctagctacaggcttaacacatgcaagtcgagcgaagcgcagaaacggatttcttcggattgaaggttctgtgactgagcggcggacgggtgagtaacgcgtggggaacctgccctgtaccgggggataacagacagaaatgtctgctaataccgcataagcgcacgagaaggcatcttcttgtgtgaaaaactccgg

SEQ ID NO: 576 - DNA, 225 bp, Unknown
  Encodes 16S rRNA from Desulfovibrio
agagtttgatcatggctcagattgaacgctggcggcgtgcttaacacatgcaagtcgaacgcgaaaggggcttcggtcccgagtagagtggcgcacgggtgagtaacgcgtggatgatctgcccctgcagctggaatagcgactggaaacggtcgataataccggatacgcccttgttgaacgatgaggggaaaggagacctctgcttgcaagtttccgtgcagg

SEQ ID NO: 577 - DNA, 225 bp, Unknown
  Encodes 16S rRNA from Lachnospiracea incertae sedis
agagtttgatcatggctcaggatgaacgctggcggcgtgcttaacacatgcaagtcgaacgaagctcttacgacggatctcttcggagtgaagatgtttgagacttagtggcggacgggtgagtaacgcgtgggtaacctgccccatagagggggacaacagttggaaacgactgctaataccgcatagtaagagaaattcgcatgtttttctcttgaaagcttt

SEQ ID NO: 578 - DNA, 225 bp, Unknown
  Encodes 16S rRNA from Lachnospiracea incertae sedis
agagtttgatcctggctcaggatgaacgctggcggcgtgcttaacacatgcaagtcgaacggagtgtcatttcttcggataggacacttagtggcggacgggtgagtaacgcgtgggtaacctgcctcacacagggggatagcagttggaaacgactgataataccgcataagcgcacagtatcgcatggtacagtgtgaaaaactccggtggtgtgagatggac

SEQ ID NO: 579 - DNA, 225 bp, Unknown
  Encodes 16S rRNA from Clostridium IV
agagtttgatcatggctcaggacgaacgctggcggcgcgcctaacacatgcaagtcgaacggagagtggtttttgattccttcgggatgattattccatttcttagtggcggacgggtgagtaacacgtgagcaacctgccttgcagtgggggataacggttggaaacgatcgctaatacctcataatatatgattgtcgcatggctttcatatcaaagtttttt

SEQ ID NO: 580 - DNA, 204 bp, Unknown
  Encodes 16S rRNA from Prevotella
agagtttgatcctggctcaggatgaacgctagctacaggctttggtcaatgggcgagagcctgaaccagccaagtagcgtgcaggatgacggccctatgggttgtaaactgcttttatacggggataaagtgagggacgtgtccctttttgtaggtaccgtatgaataaggaccggctaattccgtgccagcagccgcggtaat

SEQ ID NO: 581 - DNA, 225 bp, Unknown
  Encodes 16S rRNA from Victivallis
agagtttgatcctggctcagaatgaacgctggcggcatggattaggcatgcaagtcgaacgagaaagcggcttcggccgcgagtaaagtggcgaaagggtgagtaacacgtgaggaacctgccccctggcccggaacaagcctgtgaaaacgggtctgaaaccggatgaggccccctcccgcatgggggggaagccaaatattcatagccaagggatggcctcgc

SEQ ID NO: 582 - DNA, 225 bp, Unknown
  Encodes 16S rRNA from Clostridium XlVa
agagtttgatcctggctcaggatgaacgctggcggcgtgcttaacacatgcaagtcgaacgaagcatagcttgtgaatttcttcggattgaagcagttatgactgagtggcggacgggtgagtaacgcgtgggtaacctgccttacacagggggacaacagagggaaacctctgctaataccgcataacccgctagggccgcatggcccggacggaaaagattta

SEQ ID NO: 583 - DNA, 225 bp, Unknown
  Encodes 16S rRNA from Selenomonas
agagtttgatcatggctcaggacgaacgctggcggcgtgcttaacacatgcaagtcgaacggggcgattgaaagcttgcttttgagagcctagtggcaaacgggtgagtaacgcgtaggcaacctgcctttgggatggggacaacaggacgaaagccctgctaataccgaatgaagtattcttcctgcatgggaaggatatgaaagatggcctctgaaaatgcta

SEQ ID NO: 584 - DNA, 225 bp, Unknown
  Encodes 16S rRNA from Bacteroides
agagtttgatcatggctcaggatgaacgctagcgacaggcctaacacatgcaagtcgaggggcagcgagttggtagcaataccgatgtcggcgaccggcgcacgggtgcgtaacaggtgtgcaatctgtccatagtcggaggatagcccggtgaaaaccgaattaatactccatgtgtcattaaatcgcatgttttgatgatgaaacgtaaggactatggttgag

SEQ ID NO: 585 - DNA, 225 bp, Unknown
  Encodes 16S rRNA from Clostridium XlVa
agagtttgatcatggctcaggatgaacgctggcggcgtgcctaacacatgcaagtcgaacgggacttttaccgacggagattcgtcaaagttggtttaagtctagtggcggacgggtgagtaacgcgtggagaacctgccctttaccgggggataacagagggaagcttctgctaataccgcataagcgcacagtaccgcatggtacagtgtgaaaaactccggt

SEQ ID NO: 586 - DNA, 225 bp, Unknown
  Encodes 16S rRNA from Eggerthella
agagtttgatcctggctcaggatgaacgctggcggcgtgcttaacacatgcaagtcgaacgattaacccatcttcggatggttataaagtggcgaacgggtgagtaacacgtgaccaacctacctttcacattgggataactaagggaaactgtagctaataccaaatactccgggtatccggcatcggaaacccgggaaagctccggcggtgaaagatggggtc

SEQ ID NO: 587 - DNA, 150 bp, Unknown
  Encodes 16S rRNA from Selenomonas
agagtttgatcatggctcaggatgaacgctagctacaggcttaacacatgcaagtcgaggggacgaatgtacgggatgaaaatattgttctgtaatgacggtacctgacgaggaagccacggctaactacgtgccagcagccgcggtaat

SEQ ID NO: 588 - DNA, 225 bp, Unknown
  Encodes 16S rRNA from Mogibacterium
agagtttgatcctggctcaggatgaacgctggcggcgtgcctaatacatgcaagtcgagcgagaagcttctttgaagattcttcggatgattctgtgaagtggaaagcggcggacgggtgagtaacgcgtaggcaacctgcccctgacagagggatagccattggaaacgatgattaaaacctcataatgccgaaagagcacatgcacttacggccaaagattta

SEQ ID NO: 589 - DNA, 225 bp, Unknown
  Encodes 16S rRNA from unknown taxa
agagtttgatcctggctcaggacgaacgcttgcgacgtgcctaagaaatgcaagtcgagcgatgacgggggcttcggctccttgattagcggcgaacggtcgcgtaacacgtaagcaatctgccccaaagtttgggatagccatccgaaaggatgattaataccggatgtggaacataaatcgcatgttttatgttctaaagcagcgatgcgctttgggatgagc

SEQ ID NO: 590 - DNA, 225 bp, Unknown
  Encodes 16S rRNA from Clostridium XlVa
agagtttgatcatggctcaggatgaacgctggcggcgtgcctaacacatgcaagtcgaacggaccttttacagactgcgattcgtcaaaggacgtttaaggttagtggcggacgggtgagtaacgcgtgggtaacctgcctcatagagggggataacagtttgaaaagactgctaataccgcataagcccacaggaccgcatggtccagggggaaaagattcatc

SEQ ID NO: 591 - DNA, 225 bp, Unknown
  Encodes 16S rRNA from Victivallis
agagtttgatcctggctcagaacgaacgctggcggcatggattaggcatgcaagtcgaacgaagtagcaatacttagtggcgcaagggtgaggaacgcgtgagtgacctacccgcaagtttggaacagctcctggaaacgggaattaataccggatgtgatcaatgagctgcatggtttattgattaaagcagtaatgcgcttgcggatgggctcgcgtcccatt

SEQ ID NO: 592 - DNA, 225 bp, Unknown
  Encodes 16S rRNA from Paraprevotella
agagtttgatcatggctcaggatgaacgctagctacaggcttaacacatgcaagtcgaggggcatcacgtggcagcaatgtcatggtggcgaccggcgcacgggtgagtaacgcgtatccgacctggccttcactccgggacagccctccgaaagggggattaatccgggatgtgtggagaagtcgcatggaatctccatgaaagattcatcggtgaaggatggg

SEQ ID NO: 593 - DNA, 225 bp, Unknown
  Encodes 16S rRNA from Brevundimonas
agagtttgatcatggctcaggacgaacgctggcggtgtgcctcatacatgcaagtcgaacgataaggcttcttcggaagtacataagtggcggacgggtgagtacaacataggaaatctgccttaagctgggggacaacagagggaaactcctgctaataccccatatgagctaacttgaaatagttatcttgaaagctccggcggcttaagatgagcctgtgcc

SEQ ID NO: 594 - DNA, 225 bp, Unknown
  Encodes 16S rRNA from Prevotella
agagtttgatcatggctcaggatgaacgctagctacaggcttaacacatgcaagtcgaggggcagcgctggggttgcttgcaacccctggcggcgaccggcgcacgggtgagtaacgcgtatccaacctgcccccaaccgccgcacagcccgccgaaaggcggattaattcggcatgaggtccggcgacggcatcatatccggacgaaaggtattttaccggttg

SEQ ID NO: 595 - DNA, 225 bp, Unknown
  Encodes 16S rRNA from Prevotella
agagtttgatcatggctcaggatgaacgctagctacaggcttaacacatgcaagtcgaggggtaacgtgagagaagcttgcttctcttgacgacgaccggcgaatgggtgagtaacgcgtatccaacctgccgcacgcccgggaacagcccttggaaacgaggattaaatcccgataccttattattccgcatggagaaataagaaaacaggcatgcgatgggga

SEQ ID NO: 596 - DNA, 210 bp, Unknown
  Encodes 16S rRNA from Robinsoniella
agagtttgatcatggctcaggacgaacgctggcggcgtgcttaacacatgcaagtcgaacggggatattgcacaatgggcggaagcctgatgcagcgacgccgcgtgaaggaagaagtatttcggtatgtaaacttctatcagcggggaagaagatgacggtacccgactaagaagccccggctaactacgtgccagcagccgcggtaat

SEQ ID NO: 597 - DNA, 225 bp, Unknown
  Encodes 16S rRNA from Clostridium III
agagtttgatcatggctcaggacgaacgctggcggcgtgcctaacacatgcaagtcgaacgggattccatcgaatgaggcttcggcggattttggtggacatctagtggcggacgggtgagtaacgcgtgagcaacctgcctttaagagggggataacataccgaaaggtatgctaataccgcataagatattagtaccgcatgatacagatatcaaagatttca

SEQ ID NO: 598 - DNA, 225 bp, Unknown
  Encodes 16S rRNA from Butyricimonas
agagtttgatcatggctcaggatgaacgctagcggcaggcttaacacatgcaagtcgaggggcagcgggtctagcaatagatgccggcgaccggcgaaagggtgagtaacgcgtgagcaacatacccttgacagggggataggcactggaaacggtgtgtaataccccgtaacacattccgccgcatgacgggatgttgaaagattgattggtcaaggattggct

SEQ ID NO: 599 - DNA, 225 bp, Unknown
  Encodes 16S rRNA from Spirochaeta
agagtttgatcctggctcagaacgaacgctggcggcgcgtcttaagcatgcaagtcgagcggtaaggaggtagcttgctacttccctagagcggcggactggtgagtaacgcgtgggtgacgtaccctttggttggggatagccggtagaaataccgggtaataccgaataagacctctagtagaaagattagagaggaaagcggctccggccgcgccgaaggaa

SEQ ID NO: 600 - DNA, 225 bp, Unknown
  Encodes 16S rRNA from Hydrogenoanaerobacterium
agagtttgatcatggctcaggatgaacgctggcggcgtgcctaacacatgcaagtcgaacggaactttttacgagcaaggcttcggccaagcaagtttcaagtttagtggcggacgggtgagtaacgcgtgagcaacctgcctttcagagggggataacgtttggaaacgaacgctaataccgcataacgtatggaaatcgcatggtaaccataccaaagatttt

SEQ ID NO: 601 - DNA, 225 bp, Unknown
  Encodes 16S rRNA from Proteiniclasticum
agagtttgatcatggctcaggacgaacgctggcggcgtgcctaacacatgcaagtcgagcggggacaaaactggaagggtttcggcctggaaggaaatgttccagcggcggacgggtgagtaacgcgtgaacaatctgtcccagacagggggataacagatggaaacatctgctaataccgcataagaccacgaggcgacatcgccttgaggtaaaaggaggaat

SEQ ID NO: 602 - DNA, 225 bp, Unknown
  Encodes 16S rRNA from Roseburia
agagtttgatcatggctcaggatgaacgctggcggcgtgcttaacacatgcaagtcgaacgaattttttacagaaggaagcttcggccgacggacgtaagaagtgagtggcggacgggtgagtaacgcgtgggtaacctgcctcacatcgggggataccagtcggaaacgactgctaaaaccgcataagaccacggtatcgcatgatactgaggccaaaactccg

SEQ ID NO: 603 - DNA, 225 bp, Unknown
  Encodes 16S rRNA from Clostridium XlVa
agagtttgatcctggctcaggatgaacgctggcggcgtgcctaacacatgcaagtcgaacgaagaccccgaagcggagatttcggttgaagctaagggaggactgagtggcggacgggtgagtaacgcgtggataacctgccccatacagggggatagcagttggaaacgactgataataccgcataagcgcacggagagacatctctttgtgtgaaaagattta

SEQ ID NO: 604 - DNA, 225 bp, Unknown
  Encodes 16S rRNA from Anaerofustis
agagtttgatcatggctcaggacgaacgctggcggcgtgcttaacacatgcaagtcgaacgggaagctttgacaagttttactttgatgagtggacagtggcgaacgggtgagtaacgcgtaggtaaccaaccttatgctgggggatagcctttggaaacgaagagtaataccgcataagaccacactgccgcatggcagaggggtaaaagatttattggcatga

SEQ ID NO: 605 - DNA, 225 bp, Unknown
  Encodes 16S rRNA from Succiniclasticum
agagtttgatcatggctcaggacgaacgctggcggcgtgcctaacacatgcaagtcgaacggggattttgtttcggcagaatcctagtggcgatcggtagccggtctgagaggatgaacggccacattgggactgagacacggcccagactcctacgggaggcagcagtggggaatcttccgcaatgggcgcaagcctgacggagcaacgccgcgtgagtgagga

SEQ ID NO: 606 - DNA, 225 bp, Unknown
  Encodes 16S rRNA from Anaeroplasma
agagtttgatcctggctcaggattaacgctggcggcgtgcctaatacatgcaagtcgaatggtggtagcaatacaaaccatggcgaacgggtgagtaacacgtaggtaacctatcttactgacgaggataaccgttggaaacgacggataatactggataggacatcacaaagggcatccttagatgtttaaaggagcaatccacggtaagaggggcctgcggcg

SEQ ID NO: 607 - DNA, 225 bp, Unknown
  Encodes 16S rRNA from Oscillibacter
agagtttgatcatggctcaggacgaacgctggcggcgtgcctaacgatcagtagccggactgagaggttgaacggccacattgggactgagatacggcccagactcctacgggaggcagcagtggggaatattgggcaatgggggcaaccctgacccagcaacgccgcgtgaaggaagaaggctttcgggttgtaaacttcttttaccgaggacgaagaacgtga

SEQ ID NO: 608 - DNA, 225 bp, Unknown
  Encodes 16S rRNA from Escherichia/Shigella
agagtttgatcatggctcagattgaacgctggcggcaggcctaacacatgcaagtcgaacggtaacaggaagaagcttgcttctttgctgacgagtggcggacgggtgagtaatgtctgggaaactgcctgatggagggggataactactggaaacggtagctaataccgcataacgtcgcaagaccaaagagggggaccttcgggcctcttgccatcggatgtg

SEQ ID NO: 609 - DNA, 225 bp, Unknown
  Encodes 16S rRNA from Bacteroides
agagtttgatcctggctcaggatgaacgctagcgacaggcctaacacatgcaagtcgaggggcagcgagtttgtagcaatacagatgtcggcgaccggcgcacgggtgcgtaacaggtgtgcaacctggcctataccaagggatagcccgctgaaaggcggattaatactttataagttgtgatgaggcatctcattataatgaaacgttagggtataggatggg

SEQ ID NO: 610 - DNA, 225 bp, Unknown
  Encodes 16S rRNA from Clostridium XlVa
agagtttgatcctggctcaggatgaacgctggcggcgtgcctaacacatgcaagtcgagcggggacgcgccaaagaggatgattcgtctgattcttagcgcgtcttagcggcggatgggtgagtaacgcgtggacaacctgcccgcaacagggggataacagctggaaacggctgataataccgcatatgcacacggttccgcatgggactgggtggaaagattt

SEQ ID NO: 611 - DNA, 225 bp, Unknown
  Encodes 16S rRNA from Clostridium XlVa
agagtttgatcatggctcaggatgaacgctggcggcgtgcctaacacatgcaagtcgaacggtgaaagaagacggaagccttcgggcggaagttttttggatcagtggcggacgggtgagtaacgcgtggataacctgcctcatacagggggataacagggagaaatcactgctaataccgcataagcgcacaggaccgcatggtctggtgtgaaaaactccggt

SEQ ID NO: 612 - DNA, 225 bp, Unknown
  Encodes 16S rRNA from Clostridium IV
agagtttgatcatggctcaggatgaacgctggcggcgtgcataacacattcaagtcgaacgaagcactggcgaggaagtcttcggatggaattgcttttgacttagtggcggacgggtgagtaacgcgtgagcaaccttcctggcagtgagggataacacagggaaacttgtgctaataccgcatgacgcacgattgtcgcatggcagacgtgccaaagattaat

SEQ ID NO: 613 - DNA, 225 bp, Unknown
  Encodes 16S rRNA from Clostridium III
agagtttgatcatggctcaggacgaacgctggcggcgcgcttaacacatgcaagtcgaacggtgaaggtgcttcggcaccggatcagtggcggacgggtgagtaacacgtgagcaacctgcccttcagagggggataacattgagaaatcagtgctaataccgcataagaccacagtaaggcatcttacaggggtcaaaggagcaatccgctgaaggatgggctc

SEQ ID NO: 614 - DNA, 225 bp, Unknown
  Encodes 16S rRNA from Prevotella
agagtttgatcctggctcaggatgaacgctagctacaggcttaacacatgcaagtcgaggggcagcatgtcgtgtgcttgcacacgatgatggcgaccggcgcacgggtgagtaacgcgtatccaacctgcccatgaccccgggatagcccgctgaaaagcggattaacaccggatgcggtcgaaagaggacatctgatttcgaccaaagcttcggcggtcatgg

SEQ ID NO: 615 - DNA, 225 bp, Unknown
  Encodes 16S rRNA from Coprococcus
agagtttgatcatggctcaggatgaacgctggcggcgtgcttaacacatgcaagtcgaacgaagcacttaggacagatttcttcggattgacgacctaattgacttagtggcgaacgggtgagtaacgcgtgggtaacctgcctcatgcagggggataacaattagaaatgattgctaataccgcataagaccgcggtaccgcatggtacagcggccaaagattt

SEQ ID NO: 616 - DNA, 225 bp, Unknown
  Encodes 16S rRNA from Oscillibacter
agagtttgatcatggctcaggacgaacgctggcggcgtgcctaacacatgcaagtcgaacggaactctttggaacaaggcttcggccaagggaatttgagtttagtggcggacgggtgagtaacgcgtgagcaacctgcccttcggagggggacaacagttggaaacgactgctaataccgcatgacatacagagatcgcatggtcattgtatcaaagatttatc

SEQ ID NO: 617 - DNA, 225 bp, Unknown
  Encodes 16S rRNA from Parabacteroides
agagtttgatcctggctcaggatgaacgctagcgacaggcttaacacatgcaagtcgaggggcagcgtggcggcagcaatgccgccgacggcgaccggcgcactggtgagtaacacgtatgcaacctgccccccacagggggacaatccagagaaatttggtctaataccgcataagagcgtccccggcatcggggttgcttgaaagcaatttgcggtgggggat

SEQ ID NO: 618 - DNA, 225 bp, Unknown
  Encodes 16S rRNA from Bacteroides
agagtttgatcctggctcaggatgaacgctagctacaggcttaacacatgcaagtcgaggggcagcatgggggaggtttcggccacccccgatggcgaccggcggatgggtgagtaacgcgtatccaacctgcccctgtcccggggacagcccttagaaatgaggattaacccccgatggcgcggaggggccgcatggcttttccgccaaatgcgaaggacaggg

SEQ ID NO: 619 - DNA, 225 bp, Unknown
  Encodes 16S rRNA from Mogibacterium
agagtttgatcctggctcaggatgaacgctggcggcgtgcctaatacatgcaagtcgagcgagaaatctttcagacgattcttcggatgagtcaggaagatggaaagcggcggacgggtgagtaacgcgtaggcaacctgccctcagcagagggatagccattggaaacgatgattaaaacctcataatgctgcagtaacacatgttacagcagccaaagattta

SEQ ID NO: 620 - DNA, 225 bp, Unknown
  Encodes 16S rRNA from Solobacterium
agagtttgatcatggctcaggatgaacgctggcggcgtgcctaatacatgcaagtcgatcgcgtcatgtagcttcggttatatgatgagaggcgaacgggtgagtaatacataagcaacctgcccacggagaccgggataacccctggaaacggggactaagaccggataggcaaaatgaaggcatcttcattatgttaaaggagaaagacactggtggatgggc

SEQ ID NO: 621 - DNA, 225 bp, Unknown
  Encodes 16S rRNA from Bacteroides
agagtttgatcatggctcaggatgaacgctagctacaggcctaacacatgcaagtcgcggggcagcattgaggtagcaatacttcagatggcgaccggcgcacgggtgcgtaacgcgtatccaacctggcccttactcgggtatagccctgcgaaagtaggattaatccccgatgttgtcaagatggagccttttttcttgaccaaaggtttatgtcggtaaggg

SEQ ID NO: 622 - DNA, 225 bp, Unknown
  Encodes 16S rRNA from Clostridium III
agagtttgatcctggctcaggacgaacgctggcggcgtgcttaatccatgcaagtcgaacggggcgattccggaaagtcttcggaccggaagggagagcttagtggcgaacgggtgagtaacgcgtgaccaaccaaccttaagcagggggacaacagctggaaacggctgctaataccgcataagaccacagtggggcatcctacaggggtcaaaggagcaatcc

SEQ ID NO: 623 - DNA, 225 bp, Unknown
  Encodes 16S rRNA from Victivallis
agagtttgatcctggctcagaacgaacgctggcggcatggattaggcatgcaagtcgaacggtgcagcaatgcacagtggcgcaagggtgaggaacgcgtgagtaatctgccctcaagttgggaacagcttctggaaacggaaattaataccgaatgtgatctttgggaggcatctttcaaagattaaaggccgcaaggtcgcttgaggaggggctcgcgtccca

SEQ ID NO: 624 - DNA, 225 bp, Unknown
  Encodes 16S rRNA from Saccharofermentans
agagtttgatcatggctcaggacgaacgctggcggcgtgcctaacacatgcaagtcgagcggaggatgtgaagaagcttgcttcattgcattctcagcggcggacgggtgagtaacgcgtgagcaacctggccttcacagggggataagacggcgaaagcggttctaataccccatatgaccacactgtcacatggcagaggggtgaaaggagcaatccggtgaa

SEQ ID NO: 625 - DNA, 225 bp, Unknown
  Encodes 16S rRNA from Saccharofermentans
agagtttgatcatggctcaggacgaacgctggcggcgtgcctaacacatgcaagtcgagcggacggaggggcttcggccccgaagtcagcggcggacgggtgagtaacgcgtgagcaatctgtcccggacagggggataacacttggaaacaggtgctaataccgcataagaccacgagggggcatccttttgaggtaaaaggaggaatccggtccggggtgagt

SEQ ID NO: 626 - DNA, 225 bp, Unknown
  Encodes 16S rRNA from Olivibacter
agagtttgatcatggctcaggatgaacgctagcggcaggcctaatacatgcaagtcgtacggtaaacggtccttcgggaccgtgagagtggcggacgggtgcgtaacgcgtatgcaaccaacccccctcgccgggatagccggtggaaacgccggataataccggatgcgccgcgtgggaggcatctcccgagcggcaaggcggagacgcggagggggacgggca

SEQ ID NO: 627 - DNA, 225 bp, Unknown
  Encodes 16S rRNA from Thermotalea
agagtttgatcatggctcaggatgaacgctggcggcgtgcctaacacatgcaagtcgagcgggaatctcctgattgaaacttcggtagattgacggggaggatagcggcggacgggtgagtaacgcgtaggtaagctgccctatgcacagggatagcctagggaaacctggattaatacctgatgacgctgcgaggtcacatggccatgcagccaaagttttttc

SEQ ID NO: 628 - DNA, 225 bp, Unknown
  Encodes 16S rRNA from Proteiniclasticum
agagtttgatcatggctcaggacgaacgctggcggtatgcctaacacatgcaagtcgaacgaaaaaagagagcttgctttcttttttagtggcgcacgggtgagtaacgcgtgagtaatctgccttaaagtgggggacaacatttggaaacgaatgctaataccgcgtaatatgcagttttcgcatgaattttgtattatagatttatcgctttaagatgagctc

SEQ ID NO: 629 - DNA, 225 bp, Unknown
  Encodes 16S rRNA from Clostridium III
agagtttgatcatggctcaggacgaacgctggcggcgtgcctaacacatgcaagtcgaacgagaaatgatgattagattccttcgggatgaaaagattcatggacagtggcggacgggcgagtaacgcgtgagtaacctgcccataagagagggatagccgatggaaacgtcgagtaatacctcatattgtaattaattcgcatggattgattatgaaagattta

SEQ ID NO: 630 - DNA, 225 bp, Unknown
  Encodes 16S rRNA from Anaeroplasma
agagtttgatcctggctcaggattaacgctggcggcatgcctaatacatgcaagtcgaatgagaagcttgcttctcatggcgaacgggtgagtaacacgtaggtaacctgccttacactcgaggataaccgttggaaacgacggataatactggataggacagagattcgcatgagactctgtttaaaagcgatggtgtatgaggggcctgcggtgcattagcta

SEQ ID NO: 631 - DNA, 225 bp, Unknown
  Encodes 16S rRNA from Treponema
agagtttgatcatggctcagaacgaacgctggcggcgcgtcttaagcatgcaagtcgagcggcaaggaaggagcttgcttcttccctagagcggcggactggtgagtaacgcgtgggtgacgtaccctccggacggggacagcctgtggaaacacaggataataccggatacggtgcatgttgtcagaggacatgcaggaaaggttcttttgaaccgccggagga

SEQ ID NO: 632 - DNA, 225 bp, Unknown
  Encodes 16S rRNA from Clostridium XlVa
agagtttgatcatggctcaggatgaacgctggcggcgtgcttaatacatgcaagtcgaacggggatgtccacccgatgaggccggagtgcttgcacaaaggccgattcaaccggatatcctagtggcggacgggtgagtaacgcgtgggtaacctgccttatacaggggaataacagtcagaaatggctgctaataccgcataagcgcacgaggccgcatggcca

SEQ ID NO: 633 - DNA, 225 bp, Unknown
  Encodes 16S rRNA from Clostridium III
agagtttgatcatggctcaggacgaacgctggcggcgcgcctaacacatgcaagtcgaacgggactagtgaccggagtgcagagaggatctgtattgcgatcactagttcagtggcggacgggtgagtaaagcatgagcaacctggctactagagggggatagcttttggaaacagaagataataccgcatacatcaaagatttcgcatgagatttttggaaaag

SEQ ID NO: 634 - DNA, 225 bp, Unknown
  Encodes 16S rRNA from Desulfotomaculum
agagtttgatcatggctcaggacgaacgctggcggcgtgcttaatacatgcaagtcgaacggagattatgatttcggttgtaatcttagtggcgaacgggtgagtaacgcgtgaacaacctgactcagagtgggggataacaacgggaaactgttgctaataccgcataagaccacatttccgcatgggagaggggtcaaagatttatcgctttgagaggggttc

SEQ ID NO: 635 - DNA, 225 bp, Unknown
  Encodes 16S rRNA from Bacillus
agagtttgatcctggctcaggatgaacgctggcggcgtgcctaatacatgcaagtcgatcgggagtagcaatacttcagaggcgtacgggtgagtaacacatagggaacctgcccttaagactgggatacccagacgaaagtttggctaataccggataacaacagaggtcgcatgacctttgcttgaaaggcgctctcaagcgccacttttggatggccctgtg

SEQ ID NO: 636 - DNA, 225 bp, Unknown
  Encodes 16S rRNA from Anaerovorax
agagtttgatcatggctcaggatgaacgctggcggcgtgcctaacacatgcaagtcgagcgggaaatcgctgattgagatttcggttgattgaagcgatggatagcggcggacgggtgagtaacgcgtaggtaatctgccttcagcacagggatagcctagggaaacctggattaatacctgataatgcagtttggtcacatggccagattgccaaagatttatc

SEQ ID NO: 637 - DNA, 191 bp, Unknown
  Encodes 16S rRNA from Ruminococcus
agagtttgatcatggctcaggatgaacgctagctacaggcttaacacatgcaagtcgaggggaaaccctgatgcagcgatgccgcgtggaggaagaaggttttcggattgtaaactcctgtcttaaaggacgataatgacggtactttaggaggaagctccggctaactacgtgccagcagccgcggtaat

SEQ ID NO: 638 - DNA, 225 bp, Unknown
  Encodes 16S rRNA from Agarivorans
agagtttgatcatggctcagattgaacgctggcggcaggcttaacacatgcaagtcgtacggtaacagagggggaatattgcacaatgggggaaaccctgatgcagccatgccgcgtgtgtgaagaaggccttcgggttgtaaagcacttttgcattcgaggaagacagcacgtaaataaacgtgttatttgacgttagagtgtgaataagcaccggcaaactcc

SEQ ID NO: 639 - DNA, 225 bp, Unknown
  Encodes 16S rRNA from Anaerotruncus
agagtttgatcatggctcaggacgaacgctggcggcgcgcttaacacatgcaagtcgaacggagcttgcttttgaaggtccttcgggaacggatgttgcaagcttagtggcggacgggtgagtaacgcgtgagcaacctgcctttcagagggggataacacaacgaaagctgtgctaataccgcatgacattgcgacaccgcatggtgatgcaatcaaaggagca

SEQ ID NO: 640 - DNA, 225 bp, Unknown
  Encodes 16S rRNA from Papillibacter
agagtttgatcatggctcaggatgaacgctggcggcgtgcataacacattcaagtcgaacggacgacagggggcttgctccctgaagtcagtggcggacgggtgagtaacgcgtgagcaacctgccttggtctgcgggataacattgggaaaccggtgctaataccgcataacgcatcgagatcacatggtcatgatgccaaagaagcaatttggaacaagatgg

SEQ ID NO: 641 - DNA, 185 bp, Unknown
  Encodes 16S rRNA from Clostridium XlVa
agagtttgatcctggctcaggatgaacgctggcggcgtgcttatgcacaatgggggaaaccctgatgcagcgacgccgcgtgagcgatgaagtatttcggtatgtaaagctctatcagcagggaagaaaatgacggtacctgactaagaagcaccggctaaatacgtgccagcagccgcggtaat

SEQ ID NO: 642 - DNA, 225 bp, Unknown
  Encodes 16S rRNA from Clostridium III
agagtttgatcatggctcaggacgaacgctggcggcgtgcctaacacatgcaagtcgagcgatgatcagaagatgaggccctcgggcggattcttctgagattagcggcggatgggtgagtaacgcgtgggcaatctgccctccacagggggataacacagggaaacttgtgctaataccgcataacatctttttaaggcatcttaggaagatcaaaggagcgat

SEQ ID NO: 643 - DNA, 225 bp, Unknown
  Encodes 16S rRNA from Bacteroides
agagtttgatcatggctcaggatgaacgctagcggcaggcttaacacatgcaagtcgaggggcagcggagaagtagcaatacttctgccggcgaccggcgcacgggtgagtaacgcgtatgcaacctttcccagacagggggatagcccagggaaacttggattaataccccgtaagccagaagagggcatcctcgtctggttaaagttccggcggtctggggtg

SEQ ID NO: 644 - DNA, 225 bp, Unknown
  Encodes 16S rRNA from Clostridium XlVa
agagtttgatcctggctcaggatgaacgctggcggcgtgcctaacacatgcaagtcgaacgagcacttcggtgcgagtggcggacgggtgagtaacgcgtgggtaacctgccttacacagggggacaacagttggaaacgactgctaataccgcataagcccacggtaccgcatggtactgtgagaaaagatttatcggtgtaagatggacccgcgtctgattag

SEQ ID NO: 645 - DNA, 225 bp, Unknown
  Encodes 16S rRNA from Ruminococcus
agagtttgatcatggctcaggacgaacgctggcggcacgcttaacacatgcaagtcgaacggagttgatgacttcggttattaacttagtggcggacgggtgagtaacacgtgagcaacctgccttacagagaggaataatgactggaaacggtcactaatacctcataaaatatttagatcgcatggtttggatatcaaagatttatcgctgtaagatgggctc

SEQ ID NO: 646 - DNA, 225 bp, Unknown
  Encodes 16S rRNA from Clostridium XlVa
agagtttgatcatggctcaggatgaacgctggcggcgtgcctaacacatgcaagtcgaacgaagccctacaagtggagatttcggttgaagcgaggaggtgactgagtggcggacgggtgagtaacgcgtggagaacctggcccatacagggggatagcggctggaaacggccggtaaaaccgcataagcgcacaagcagggcatcctgtggtgtgaaaatcgaa

SEQ ID NO: 647 - DNA, 225 bp, Unknown
  Encodes 16S rRNA from Oscillibacter
agagtttgatcatggctcaggacgaacgctggcggcgtgcctaacacatgcaagtcgaacgaagctccaacacttgagttttcggacaagagtggcggaagacttagtggcggactggtgagtaacgcgtgagcaacctgccttccggtgggggacaacagttggaaacgactgctaataccgcataacatatgtctaaggcatcttagatatatcaaagcttta

SEQ ID NO: 648 - DNA, 225 bp, Unknown
  Encodes 16S rRNA from Nitrobacter
agagtttgatcatggctcagagcgaacgctagcggaatgctttatacatgcaagtcgaacgaacgagtttatattgagtagcaatacgatttatgaatgagttagtggcaaacgggtgagtaatagttaggaacttgccgaatagtgggggacaacagatagaaatgtctgctaataccgcatattcccgagaggggaaagatttattgctatttgagaggccta

SEQ ID NO: 649 - DNA, 225 bp, Unknown
  Encodes 16S rRNA from Clostridium XlVa
agagtttgatcatggctcaggatgaacgctggcggcgtgcctaacacatgcaagtcgaacggggtacagacgctgtgagagaaagcagcttgctgtggacttaaacttgtttgtacttagtggcggacgggtgagtaacgcgtggaaaacctgcctcatacagggggataacaggaagaaattcctgctaataccgcataagcgcacggtatcgcatggtacagt

SEQ ID NO: 650 - DNA, 225 bp, Unknown
  Encodes 16S rRNA from Lachnospiracea incertae sedis
agagtttgatcctggctcaggatgaacgctggcggcgtgcttaacacatgcaagtcgaacgggacttttggagcttgctccggaagttcagtggcggacgggtgagtaacgcgtgggtaacctgccgcatgcagggggacaacagttggaaacgactgctaataccgcataagcgcacgggaccgcatggtccggtgtgaaaagatttatcggcatgcgatggac

SEQ ID NO: 651 - DNA, 225 bp, Unknown
  Encodes 16S rRNA from Limibacter
agagtttgatcatggctcaggatgaacgctagcggcaggcctaatacatgcaagtcgtacggtaagcgccccttcgggggtgtgagagtggcggacgggtgcgtaacgcgtatgcaaccaacccccctcgccgggatagccggtggaaacgccggataataccggatgcgccgcgtgggaggcatctcccgagcggcaaggcggagacgcggagggggacgggca

SEQ ID NO: 652 - DNA, 225 bp, Unknown
  Encodes 16S rRNA from Desulfovibrio
agagtttgatcctggctcagattgaacgctggcggcgtgcctaacacatgcaagtcgaacgcgaaaggggcttcggccccgagtagagtggcgcacgggtgagtaacgcgtggataatctgcccctgcggctggaatagcgactggaaacggtcgataatgccggatacgcccttgtttaacgatgaggggaaaggagacctctgcttgcaagtttccgtgcagg

SEQ ID NO: 653 - DNA, 225 bp, Unknown
  Encodes 16S rRNA from Coprococcus
agagtttgatcatggctcaggatgaacgctggcggcgtgcttaacacatgcaagtcgaacgaagcacttttctttgattcttcggatgaaaaagagatttgactgagtggcggacgggtgagtaacgcgtgggtaacctgccctgtacagggggataacagttagaaatgactgctaataccgcataagaccacagcatcgcatggtgcagtggtaaaaactccg

SEQ ID NO: 654 - DNA, 225 bp, Unknown
  Encodes 16S rRNA from Anaerovorax
agagtttgatcatggctcaggattaacgctggcggcgtgcctaacacatgcaagtcgagcgggaaatttgagagtgaggcttcggcggatctcttaaatggagagcggcggacgggtgagtaacgcgtaggtaacctgccctgcacagagggatagccactggaaacggtgattaatacctcataaaactgttttgccgcatgacagaacagccaaagatttatc

SEQ ID NO: 655 - DNA, 225 bp, Unknown
  Encodes 16S rRNA from Spirochaeta
agagtttgatcctggctcagaacgaacgctggcggcgcgtcttaagcatgcaagtcgaacggcaagctaccttcgggtagcctagagtggcggactggtgagtaacacgtgggtgacatgccttcaggactggaatagcctgcagaaatgcagggtaatgccggatacggtgcaggacgttaggggtcctgcaagaaaggagcatttgctccgccgggagattgg

SEQ ID NO: 656 - DNA, 225 bp, Unknown
  Encodes 16S rRNA from unknown taxa
agagtttgatcatggctcaggacgaacgctggcggcgtgcttcatacatgcaagtcgaacgagaagcaagagcttgctcttgtggaaagtggcggacgggtgagtaacacgtagggaatctgccttcaggcgggggacaacagttggaaacgactgctaataccccatatgagctaagttgaaatacttatcttgaaaactccggtgcctgtagatgagcctgcg

SEQ ID NO: 657 - DNA, 225 bp, Unknown
  Encodes 16S rRNA from Saccharofermentans
agagtttgatcatggctcaggacgaacgctggcggcgtgcctaacacatgcaagtcgagcggagatgaggagaagcttgcttcgagacatctcagcggcggacgggtgagtaacgcgtgagcaacctgtcctctgcagggggataagacagcgaaagttgttctaataccgcataagaccacaacgtcacatggcgaaggggtcaaaggaggaatccggcagagg

SEQ ID NO: 658 - DNA, 225 bp, Unknown
  Encodes 16S rRNA from Anaeroplasma
agagtttgatcatggctcaggattaacgctggcggcgtgcctaatacatgcaagtcggatggttagcttgctaaccatggcgaacgggtgagtaacacgtaggcaacctgtctaaaagacgaggataaccattggaaacgatggataatactggataggattatttagggcatcctagataatttaaagatttatcacttttagaggggcctgcggcgcattagc

SEQ ID NO: 659 - DNA, 225 bp, Unknown
  Encodes 16S rRNA from Clostridium III
agagtttgatcatggctcaggacgaacgctggcggcgtgcttaatccatgcaagtcgaacggggcgattccggaaagtcttcggactggaaggaagagcttagtggcgaacgggtgagtaacgcgtgaccaaccaaccttaagcagggggacaacagctggaaacggctgctaataccgcataagaccacggtggggcatctcacaggggtcaaaggagcaatcc

SEQ ID NO: 660 - DNA, 225 bp, Unknown
  Encodes 16S rRNA from Victivallis
agagtttgatcctggctcagaacgaacgctggcggcatggattaggcatgcaagtcgaacgaagcagcaatgcttagtggcgcaagggtgaggaacacgtgagtgacctacccgcaagtttggaacagctcctggaaacgggaattaataccggatgtgatcaacgggctgcatggtctgttgattaaagcagcaatgcgcttgcggatgggctcgcgtcccatt

SEQ ID NO: 661 - DNA, 225 bp, Unknown
  Encodes 16S rRNA from Enterorhabdus
agagtttgatcatggctcaggatgaacgctggcggcgtgcctaacacatgcaagtcgaacggttaaggcggcttcggccgcgaatagagtggcgaacgggtgagtaacacgtgaccaacctgccccgcgcaccgggacagcctcgtgaaaacgggattaataccggatactccggcggcgcgggatggggtcgcggcccattaggtagtaggcggggtgacggcc

SEQ ID NO: 662 - DNA, 225 bp, Unknown
  Encodes 16S rRNA from Clostridium IV
agagtttgatcatggctcaggatgaacgctggcggcgtgcttaacacattcaagtcgaacggattccaggggagcttgctccccgaagaattagtggcggacgggtgagtaacgcgtgagcaacctgccttttttcgggggataacacggggaaaccggtgctaataccgcataacgtgccgaagtcgcatggctttggtaccaaaggagtaatccgaggaaaga

SEQ ID NO: 663 - DNA, 225 bp, Unknown
  Encodes 16S rRNA from Erysipelothrix
agagtttgatcctggctcaggatgaacgctggcggcgtgcctaatacatgcaagtcgaacgaagtacttcggtacttagtggcgaacgggtgagtaacacataaacaatctaccctgaagactgggataacggttggaaacgaccgctaataccggataggtgatcttaaggcatcttgagatcattaaagttgggctacaacactgcaggatgagtttatgtcg

SEQ ID NO: 664 - DNA, 225 bp, Unknown
  Encodes 16S rRNA from Clostridium III
agagtttgatcatggctcaggacgaacgctggcggcgtgcctaacacatgcaagtcgaacggagtgtatctgtgaatgagagaagcttgcttcaggaattctttgatatcacttagtggcgcacgggtgagtaacgcgtgggcaatctgcctttcacagggggacaacagagggaaacttctgctaataccgcataacatcaatttaaggcatcttagaatgatc

SEQ ID NO: 665 - DNA, 225 bp, Unknown
  Encodes 16S rRNA from Clostridium sensu stricto
agagtttgatcatggctcaggacgaacgctggcggcatgcctaacacatgcaagtcgaacggaataggtttggttgtagcgatactttcggacctatttagtggcgaacgggtgagtaacacgtgagcaacctgccttctacacagggataacagccggaaacggctgctaataccggataagaccacaccgaggcatctcggaggggtcaaagcgatttagcgg

SEQ ID NO: 666 - DNA, 225 bp, Unknown
  Encodes 16S rRNA from Gelidibacter
agagtttgatcctggctcaggataaacgctagcggcaggcctaacacatgcaagtcgagcggcagcggggtgtagcaatacattgccggcgagcggcggacgggtgagtaacgcgtatgcaacctgcccaccacacggagatagccgaccgaaaggacgattaaactccgatggcacctcatcaaggcatcttcttgaggttaaatattcataggtggtggatgg

SEQ ID NO: 667 - DNA, 225 bp, Unknown
  Encodes 16S rRNA from Roseburia
agagtttgatcctggctcaggatgaacgctggcggcgtgcttaacacatgcaagtcgaacgaagctcttttgcggatttcttcggattgaagtagaagatgacttagtggcggacgggtgagtaacgcgtgggtaacctgcctctgacagggggacaacagttagaaatgactgctaacaccgcataagcgcacagtaaggcatcttacagtgtgaaaatattca

SEQ ID NO: 668 - DNA, 225 bp, Unknown
  Encodes 16S rRNA from Neisseria
agagtttgatcctggctcagattgaacgctggcggcatgctttacacatgcaagtcgaacggcagcgtggtagtgcttgcactactgacggcgagtggcgaacgggtgagtaatgcatcggaatgtaccgagtaatgggggataactaatcgaaagattagctaataccgcatacgacctgagggtgaaagcaggggatcttaggaccttgcgttattcgagcag

SEQ ID NO: 669 - DNA, 225 bp, Unknown
  Encodes 16S rRNA from Prevotella
agagtttgatcctggctcaggatgaacgctagctacaggcttaacacatgcaagtcgaggggcatcaggattctagcttgctaggattgctggcgaccggcgcacgggtgagtaacgcgtatccaacctgccgcatagtcgggcacagccctctgaaaggaggattaatgccggatgtggtcattgtgggacatcccattatgactgaagatttattgctatgcg

SEQ ID NO: 670 - DNA, 225 bp, Unknown
  Encodes 16S rRNA from unknown taxa
agagtttgatcatggctcaggacgaacgctggcggcgtgcttcatacatgcaagtcgaacgagaatctggtgcttgcaccagaggaaagtggcggacgggtgagtaaaatgtagagaatctgccctagagagggggatagcagttggaaacgactattaataccccatatgcgcgtagttgagatactattcgtgaaaactccggtgctctgggatgagtctgca

SEQ ID NO: 671 - DNA, 225 bp, Unknown
  Encodes 16S rRNA from Oscillibacter
agagtttgatcatggctcaggacgaacgctggcggcatgcctaacacatgcaagtcgaacgggactcttaacgaccgaggcttcggccaagtgaattttgagtttagtggcggacgggtgagtaacgcgtgagcaacctgcctttcagagggggacaacagttggaaacgactgctaataccgcatgacatacggagggggcatcccttttgtatcaaagattta

SEQ ID NO: 672 - DNA, 225 bp, Unknown
  Encodes 16S rRNA from unknown taxa
agagtttgatcatggctcagggttaacgctagcggtgcgcctaacacatgcaagtcgagcgggaatgtgagaaagcttgctttcaaacaagatagcggcgaacgggtgagtaatatgttggtatctgtccttaagtcaggaatagctcagggaaacttgaattaatgccggatgtgctctttggagtaaagatttatcgcttaagggggagccttcattctatca

SEQ ID NO: 673 - DNA, 225 bp, Unknown
  Encodes 16S rRNA from Prevotella
agagtttgatcatggctcaggatgaacgctagctacaggcttaacacatgcaagtcgcggggcagcatgggagttgcttgcaacttccgatggcgaccggcgcacgggtgcgtaacgcgtatccaacctacccgcaagtcagggccagcccggcgaaagtcggattaatccctgatgtggtgcgaagaggacatctgattcacattaaaggagcgatttgcttgc

SEQ ID NO: 674 - DNA, 225 bp, Unknown
  Encodes 16S rRNA from Saccharofermentans
agagtttgatcatggctcaggacgaacgctggcggcgtgcctaacacatgcaagtcgagcggggataattgacggaaggtttcggccggaaggcgattattctagcggcggacgggtgagtaacgcgtgagcaacctttccttcacagggggataaaacaccgaaaggtgtcctaataccgcatgagaccacgggagcacatgcttttgaggtcaaaggagcaat

SEQ ID NO: 675 - DNA, 225 bp, Unknown
  Encodes 16S rRNA from Erysipelotrichaceae incertae sedis
agagtttgatcctggctcaggattaacgctggcggcatgcctaatacatgcaagtcgaacgagagtagcaatactctagtggcgaacgggtgagtaacacgtaggcaatctacccattagacgaggataactattggaaacgatagctaaaactggataggatatagcgaggcatcttgtaatatttaaaggtcctgaaagggaacactaatggatgagcctgcg

SEQ ID NO: 676 - DNA, 225 bp, Unknown; identical to SEQ ID NO: 466
  Encodes 16S rRNA from Spirochaeta

SEQ ID NO: 677 - DNA, 225 bp, Unknown
  Encodes 16S rRNA from Clostridium XlVa
agagtttgatcatggctcaggatgaacgctggcggcgtgcctaacacatgcaagtcgaacgagcgagagatgaaacctggtgattctcaagcgagtggcggacgggtgagtaacgcgtgggtaacctgccttacagagggggataacagtctgaaaagactgctaataccgcataagcacacagtaccgcatggtacagggtgaaaagatttatcactgtaagat

SEQ ID NO: 678 - DNA, 225 bp, Unknown
  Encodes 16S rRNA from Clostridium XlVb
agagtttgatcatggctcaggacgaacgctggcggcgtgcttaacacatgcaagtcgtacggggtatagcaatatacctagtggcgaacgggtgagtaacacgtgagtaacctgccctatacagggggacaacagctggaaacggctgctaataccgcataagaccacggaaccgcatggttcaggggtaaaaggctacggccggtataggatgggctcgcgcac

SEQ ID NO: 679 - DNA, 225 bp, Unknown
  Encodes 16S rRNA from Clostridium XlVa
agagtttgatcatggctcaggatgaacgctggcggcgtgcctaacacatgcaagtcgagcggagataagttgaagcctagcgattcttatcttagcggcggatgggtgagtaacacgtgggtaacctgccctgtactggggaataacagctggaaacggctgttaatgccgcatatgcgcacggagccgcatgactccgggcggaaagatttatcggtacaggat

SEQ ID NO: 680 - DNA, 225 bp, Unknown
  Encodes 16S rRNA from Adlercreutzia
agagtttgatcctggctcaggatgaacgctggcggcgtgcctaacacatgcaagtcgaacggttaaaccggcttcggccggaaatacagtggcgaacgggtgagtaacacgtgaccaacctgccccgcgcaccgggatagccccccgaaagggggattaataccggatgcgccgggccggccgcatggccggcccgggaaagcccaggcggcgcgggatggggtc

SEQ ID NO: 681 - DNA, 225 bp, Unknown
  Encodes 16S rRNA from Clostridium XlVa
agagtttgatcctggctcaggatgaacgctggcggcgtgcctaacacatgcaagtcgaacggaaatggttgatgaagttttcggatggatttttccattttagtggcggacgggtgagtaacgcgtgggtaacctgccctgtaccgggggataacattcagaaatgagtgataataccgcataagcgcacagcttcgcatgaagcagtgtgaaaaactccggtgg

SEQ ID NO: 682 - DNA, 225 bp, Unknown
  Encodes 16S rRNA from Lachnospiracea incertae sedis
agagtttgatcctggctcaggatgaacgctggcggcgtgcctaacacatgcaagtcgaacgaagctcctttgcggaactcttcggagggaaggaaaggatgactgagtggcggacgggtgagtaacgcgtgggtaacctgccctgtacagggggacaacagttagaaatgactgctaataccgcataagcgtacagcatcgcatgatgcagtacgaaaaactgag

SEQ ID NO: 683 - DNA, 225 bp, Unknown
  Encodes 16S rRNA from Clostridium IV
agagtttgatcatggctcaggatgaacgctggcggcgtgcttaacacatgcaagtcgaacgaggttagagtcttcggattttaaccgagtggcggacgggtgagtaacgcgtgaacaatctgtcctgcaaagggggataacaactggaaacagttgctaataccgcataagaccacagtatcgcatggtacagaggtaaaagcagcaatgcgatgcagggtgagt

SEQ ID NO: 684 - DNA, 225 bp, Unknown
  Encodes 16S rRNA from Adlercreutzia
agagtttgatcctggctcaggatgaacgctggcggcgtgcttaacacatgcaagtcgaacggtcaaaccgccctcgggcggacataaagtggcgaacgggtgagtaacacgtgaccaacctgccccgcgcaccgggacagccccccgaaagggggattaataccggatactccggggagggcgcatgccctccccgggaaagctccggcggcgcgggatggggtc

SEQ ID NO: 685 - DNA, 225 bp, Unknown
  Encodes 16S rRNA from Prevotella
agagtttgatcatggctcaggatgaacgctagcgacaggcctaacacatgcaagtcgaggggcagcatggagtagcaatactctgatggcgaccggcgcacgggtgcgtaacaggtgtgcaatctgtcctataccggggaatagcccagcgaaagttgaattaaagctccatgtgagtgagagccgcatgactcccacttgaaacgtaagggtataggatgagca

SEQ ID NO: 686 - DNA, 225 bp, Unknown
  Encodes 16S rRNA from Syntrophococcus
agagtttgatcatggctcaggatgaacgctggcggcgtgcttaacacatgcaagtcgaacgggaacctcacgacggagacttcggttgaagatgtgagaattctagtggcggacgggtgagtaacgcgtgggtaacctgcccatgagaggaggataacagggagaaattcttgctaatactccatatgcttacggtatcgcatgatacagtgaggaaagaatttc

SEQ ID NO: 687 - DNA, 225 bp, Unknown
  Encodes 16S rRNA from Treponema
agagtttgatcatggctcagaataaacgctggcggcgtgtcttaagcatgcaagtcgaacggcaaggtaccttcgggtaccctagagtggcggactggtgagtaacacgtaggtgacgtaccttttggacggggatagcccgtagaaatacgggataataccggataaggttgcacgggttggagccgtgcaaggaaaggcgctacggcgtcgccgaaagaacgg

SEQ ID NO: 688 - DNA, 225 bp, Unknown
  Encodes 16S rRNA from Prevotella
agagtttgatcatggctcaggatgaacgctagctacaggcttaacacatgcaagtcgtggggcagcacgggaagcagcaatgcttttgggtggcgaccggcgaatgggtgagtaacgagtatccaacctgccccgtgctccgggacagccccgcgaaagcgggattaataccggatggtgcgtgtttcccgcatgggatatacgtcaaagattcatcggcacggg

SEQ ID NO: 689 - DNA, 225 bp, Unknown
  Encodes 16S rRNA from Clostridium III
agagtttgatcctggctcaggacgaacgctggcggcgtgcctaacacatgcaagtcgaacgagaaatatgacaatgatcctttcggggtgatttggattatggacagtggcggacgggcgagtaacgcgtgagtaacctgcccataagagagggatagccgatggaaacgtcgagtaatacctcatattgtaattaattcgcatggattgattatgaaagattta

SEQ ID NO: 690 - DNA, 225 bp, Unknown
  Encodes 16S rRNA from Pseudoflavonifractor
agagtttgatcatggctcaggatgaacgctggcggcgtgcttaacacatgcaagtcgaacggagcatacttgatggtaactgatggtattgcttagtggcggacgggtgagtaacgcgtgaggaacctgccttggagtggggaataacagtcagaaatgattgctaataccgcataatgtatacgggtcgcatggtctgtataccaaagatttatcgctctgaga

SEQ ID NO: 691 - DNA, 225 bp, Unknown
  Encodes 16S rRNA from Clostridium IV
agagtttgatcatggctcaggatgaacgctggcggcgtgcataacacattcaagtcgaacgaagcactttgacggaagccttcgggcggaagttgatttgacttagtggcggacgggtgagtaacgcgtgagcaacctgcctgtatgtgagggataacacagggaaacttgtgctaataccgcatgaagcatgggaatcgcatggttttgatgccaaagacttgt

SEQ ID NO: 692 - DNA, 225 bp, Unknown
  Encodes 16S rRNA from Sharpea
agagtttgatcatggctcaggattaacgctggcggcgtgcctaatacatgcaagtcggccggggaggggaaagcttgctttcacctcccaggggcgaacgggtgagtaatacgtaagcaacctgcccgcgggtccgggataagccctggaaacggggtctaagaccggataggcggcgggggcgcatgccccctccgttaaaggcgagaaacgcctgcggatggg

SEQ ID NO: 693 - DNA, 225 bp, Unknown
  Encodes 16S rRNA from Dongia
agagtttgatcatggctcagaacgaacgctggcggcacgcttaacacatgcaagtcgaacggtgcaatggggcttgctctattgcatagtggcggacgggtgagtaacacgtaggaacctacctggtaatggtggatagcttcgggaaactggaggtaatacagcatgagctcgagagaggaaaggccataaggtcgttaccagaggggcctgcggatgattagg

SEQ ID NO: 694 - DNA, 225 bp, Unknown
  Encodes 16S rRNA from Eubacterium
agagtttgatcatggctcaggacgaacgctggcggcgtgcctaacacatgcaagtcgaacgaagcttgaattcagaattcttcggaaggacgaatgaaatgactgagtggcggacgggtgagtaacgcgtgagcaacctgccctttggatggggatagcgtttggaaacgaacggtaatacccaataaagtatatttgtggcatcgcagatataccaaagctccg

SEQ ID NO: 695 - DNA, 225 bp, Unknown
  Encodes 16S rRNA from Prevotella
agagtttgatcatggctcaggatgaacgctagctacaggcttaacacatgcaagtcgaggggcagcatgtcgtgtgcttgcacacgatgatggcgaccggcgcacgggtgagtaacgcgtatccaacctgcccatgaccccgggatagcccgctgaaaagcggattaacaccggatgtggtcgaacgaggacatctgatttcgaccaaagcttttttgcggtcat

SEQ ID NO: 696 - DNA, 225 bp, Unknown
  Encodes 16S rRNA from Clostridium IV
agagtttgatcatggctcaggacgaacgctggcggcgtgcttaacacatgcaagtcgaacgagaacctgtggaaggagttttcggacaacggaaacaggggaaagtggcggacgggtgagtaacgcgtgaggaacctgccttggagagggggacaacagctggaaacggctgctaataccgcatgatgcacgatggggacatccccgacgtgccaaagatttatc

SEQ ID NO: 697 - DNA, 204 bp, Unknown
  Encodes 16S rRNA from Parabacteroides
agagtttgatcatggctcaggatgaacgctagcgacaggctttggtcaatggacgctagtctgaaccagccaagtcgcgtgcgggatgaaggccctccgggtcgtaaaccgctttagccggggagtaacgtgggggacgcgtccctcagtgagagtacccggagaataagcatcggctaactccgtgccagcagccgcggtaat

SEQ ID NO: 698 - DNA, 225 bp, Unknown; identical to SEQ ID NO: 518
  Encodes 16S rRNA from Brevundimonas

SEQ ID NO: 699 - DNA, 225 bp, Unknown
  Encodes 16S rRNA from Clostridium XlVa
agagtttgatcctggctcaggatgaacgctggcggcgtgcttaacacatgcaagtcgaacggactttactgaaaagagggcttgcccgatggaaggtaaagttagtggcggacgggtgagtaacgcgtgggtaacctgccttacacagggggacaacagttggaaacgactgctaataccgcataagccggtagtgccgcatggcacatccggaaaagatttatc

SEQ ID NO: 700 - DNA, 225 bp, Unknown
  Encodes 16S rRNA from Ruminococcus
agagtttgatcctggctcaggacgaacgctggcggcacgcttaacacatgcaagtcgaacggaacttgggagcttgctttcaagtttagtggcggacgggtgagtaacacgtgagcaacctgcctttcggcggggaataatgattggaaacgatcactaataccccataaaataaatttaccgcatgataaatttatcaaagattcatcaccgaaagatgggctc

SEQ ID NO: 701 - DNA, 225 bp, Unknown
  Encodes 16S rRNA from Thermotalea
agagtttgatcctggctcaggattaacgctggcggcgtgcctaacacatgcaagtcgagcgagaattgacagaatgaaacttcggtggaattcagtcaaggacagcggcggacgggtgagtaacgcgtgggcaacctgcccctttccggaggatagccaagggaaactttgaataatactccataaagcatcattaccgcatgatagagatgccaaagatttatc

SEQ ID NO: 702 - DNA, 225 bp, Unknown
  Encodes 16S rRNA from Victivallis
agagtttgatcctggctcagaacgaacgctggcggcatggattaggcatgcaagtcgaacggtgcagcaatgcatagtggcgcaagggtgaggaacgcgtgagtaatctgccctcaagttgggaacagcttctggaaacggaaattaataccgaatgtgatctcagggaggcatctttctgggattaaaggccgcaaggtcgcttgaggaggggctcgcgtccca

SEQ ID NO: 703 - DNA, 225 bp, Unknown
  Encodes 16S rRNA from Anaeroplasma
agagtttgatcatggctcaggattaacgctggcggcgtgcctaatacatgcaagtcgaatggttagcttgctaaccatggcgaacgggtgagtaacacgtaggcaacctgtctatcagccgaggataaccattggaaacgatggataatactggataggatatagataggcatctaattatatttaaagatttatcactgatagaggggcctgcggcgcattagc

SEQ ID NO: 704 - DNA, 225 bp, Unknown
  Encodes 16S rRNA from Oscillibacter
agagtttgatcctggctcaggacgaacgctggcggcgtgcctaacacatgcaagtcgaacgaagctccgagaaacaagacttcggtcaagcggaacggatgactgagtggcgaacgggtgagtaacgcgtgaggaacctgcctttcagtgggggataacagttggaaacgactgctaataccgcatgaagtattctgggggcatccccggggtaccaaagattta

SEQ ID NO: 705 - DNA, 225 bp, Unknown
  Encodes 16S rRNA from Ruminococcus
agagtttgatcctggctcaggacgaacgctggcggcacgcctaacacatgcaagtcgagcggtgaattttggatttattcgagattcatagcggcggacgggtgagtaacacgtgagcaacctacctctaagtgagggatagcttctggaaacggatggtaataccttataatatatatttatcacatgatagatatatcaaagatttattgcttagagatgggc

SEQ ID NO: 706 - DNA, 225 bp, Unknown
  Encodes 16S rRNA from Clostridium XlVa
agagtttgatcctggctcaggatgaacgctggcggcgtgcctaacacatgcaagtcgaacgaggctctgcgaaatgaagattcgtctgaatttcaaggatgtccgagtggcggatgggtgagtaacgcgtggagaacctgccctatgctgggggataacaactggaaacggttgacaataccgcataagcttccttagtcgcatgaccttggaaggaaagattta

SEQ ID NO: 707 - DNA, 225 bp, Unknown
  Encodes 16S rRNA from Clostridium XlVa
agagtttgatcctggctcaggatgaacgctggcggcgtgcttaacacatgcaagtcgaacgaatttccttcgaacagaggcttcggccaacgggagattgaagtgagtggcggacgggtgagtaacgcgtgggtaacctgccttacaccgggggataacagagggaaacttctgctaataccgcataagaccacggtaccgcatggtacagaggtaaaagttccg

SEQ ID NO: 708 - DNA, 225 bp, Unknown
  Encodes 16S rRNA from Clostridium IV
agagtttgatcatggctcaggatgaacgctggcggcgtgcttaacacattcaagtcgaacgaagcatattggaacgagacttcggtcaagggaaggtatgacttagtggcggacgggtgagtaacgcgtgagcaacctgcctcggggtgcgggataacgattggaaacgaccgctaataccgcatgacgcatatttttcgcatgtgagatatgccaaagattcat

SEQ ID NO: 709 - DNA, 225 bp, Unknown
  Encodes 16S rRNA from Roseburia
agagtttgatcatggctcaggatgaacgctggcggcgtgcttaacacatgcaagtcgaacggagatgtttcgctggggcggcttcggccaaaccttgaggcatcttagtggcggacgggtgagtaacgcgtgggtaacctgcctatcacagggggacaacagttggaaacgactgctaataccgcataagcgcacggcaccgcatggtgcagtgtgaaaagattc

SEQ ID NO: 710 - DNA, 225 bp, Unknown
  Encodes 16S rRNA from Eggerthella
agagtttgatcctggctcaggatgaacgctggcggcgtgcctaacacatgcaagtcgaacggagaaaccgccctcgggcggagatgaagtggcgaacgggtgagtaacacgtgaccaacctgccccgcgcaccgggacagccccccgaaagggggattaataccggatgcgccggccgggccgcatggcccggccgggaaagcccaggcggcgcgggatggggtc

SEQ ID NO: 711 - DNA, 225 bp, Unknown
  Encodes 16S rRNA from Clostridium III
agagtttgatcatggctcaggacgaacgctggcggcgtgcctaacacatgcaagtcgaacggacatactagcaatagtatgttagtggcggacgggtgagtaatacatgagtaacctgccttatacagggggataacacttagaaataggtgctaataccgcataataacccttggtggcatcaccaggggaggaaaggagaaatccagtaaaagatgggctcat

SEQ ID NO: 712 - DNA, 225 bp, Unknown
  Encodes 16S rRNA from Clostridium XlVa
agagtttgatcctggctcaggatgaacgctggcggcgtgcctaacacatgcaagtcgaacggggtacagacgctgtgagaagaagtgcttgcacggaatcgaacttgtttgtacttagtggcggacgggtgagtaacgcgtggaaaacctgcctcatacagggggataacaggaagaaattcctgctaataccgcataagcgcacagtatcgcatgatagagtgt

SEQ ID NO: 713 - DNA, 225 bp, Unknown
  Encodes 16S rRNA from Lactobacillus
agagtttgatcatggctcaggacgaacgctggcggcgtgcctaatacatgcaagtcgaacgcatcccgttgaattgaagtgcttgcactgatttttaacatcggatgagtggcgaactggtgagtaacacgtgggtaacctgcccagaagcgggggataacacttggaaacaggtgctaataccgcataacaacagaaaccgcatggtttctgtttgaaagatgg

SEQ ID NO: 714 - DNA, 225 bp, Unknown
  Encodes 16S rRNA from Bacteroides
agagtttgatcctggctcaggatgaacgctagctacaggcttaacacatgcaagtcgaggggcagcatgacgatagcttgctattgttgatggcgaccggcgcacgggtgcgtaacacgtatccaatctacccggtactcggggatagcctttcgaaagaaagattaatacccgatactgttggatctccgcatggcggtccaaccaaagatttcatcggtgccg

SEQ ID NO: 715 - DNA, 225 bp, Unknown
  Encodes 16S rRNA from Cellulosilyticum
agagtttgatcatggctcaggatgaacgctggcggcgtgcctaacacatgcaagtcgagcggagataatgcaccggatgaagattcgtcggattccaccgcgttatcttagcggcggatgggtgagtaacacgtggacaacctgcccataactgggggatagcagttggaaacgactgataataccgcatatgctcacagcaccgcatggtgcagggaggaaaga

SEQ ID NO: 716 - DNA, 225 bp, Unknown
  Encodes 16S rRNA from Brevundimonas
agagtttgatcatggctcaggacgaacgctggcggtgtgcctcatacatgcaagtcgaacgataaggtctcttcggagatacataagtggcggacgggtgagtacaacataggaaatctgccttagggtgggggacaacagagggaaactcctgctaataccccatatgagctaacttgaaatagttatcttgaaaactccggtgccctaagatgagcctgtgcc

SEQ ID NO: 717 - DNA, 225 bp, Unknown
  Encodes 16S rRNA from Clostridium IV
agagtttgatcatggctcaggatgaacgctggcggcgtgcataacacattcaagtcgaacgaagcactgacgatgaagtcttcggacggaattgtctttgacttagtggcggacgggtgagtaacgcgtgagcaaccttcctgtttgtgagggataacacagggaaacttgtgctaataccgcatgacgcatgggaatcgcatggtttcgatgccaaagatttat

SEQ ID NO: 718 - DNA, 225 bp, Unknown
  Encodes 16S rRNA from Prevotella
agagtttgatcctggctcaggatgaacgctagctacaggcttaacacatgcaagtcgaggggcagcatgacgagtgcttgcacttgttgatggcgaccggcgcacgggtgcgtaacgcgtatcgaaccttccccttactcgggaatagcccggtgaaaaccgaattaatgcccgatatatatttagatggcatcagaagagtatgaaagatttatcggtaaggga

SEQ ID NO: 719 - DNA, 225 bp, Unknown
  Encodes 16S rRNA from Helicobacter
agagtttgatcatggctcagagttaacgctggcggcgtgcctaacacatgcaagtcgagcgagtgcttgtaaagactagcggcaaacgggtgagtaacacatgggaaaccttccttagaatgggggatatctccgtgaaaacggagctaataccgcataagaccacagtttggcatcgaacaggggtaaaagcagcaatgtgttctaagatggtcctgtgtccta

SEQ ID NO: 720 - DNA, 225 bp, Unknown
  Encodes 16S rRNA from Clostridium IV
agagtttgatcctggctcaggacgaacgctggcggcacgcttaacacatgcaagtcgaacggagttgtattagcttgctaatataacttagtggcggacgggtgagtaacacgtgagcaacctgccttcgagagtggaataatgtttggaaacggacactaataccgcatgacatacggaattcgcatgtttttcgtatcaaagatttatcgctcgaagatgggc

SEQ ID NO: 721 - DNA, 225 bp, Unknown
  Encodes 16S rRNA from Proteiniclasticum
agagtttgatcatggctcaggacgaacgctggcggtatgcctaacacatgcaagtcgaacgaaaacggggcttgctctcgtttttagtggcgcacgggtgagtaacgcgtgagtaatctgccttaaagtggggaacaacatttggaaacgaatgctaataccgcgtaatatacagttttcgcatgaattttgtattatagatttatcgctttaagatgagctcgc

SEQ ID NO: 722 - DNA, 225 bp, Unknown
  Encodes 16S rRNA from Brevundimonas
agagtttgatcatggctcagagcgaacgctggcggcaggcctaacacatgcaagtcgaacgaactcttcggagttagtggcggacgggtgagtaacacgtgggaacgtgcctttaggttcggaataactcagggaaacttgtgctaataccgaatgtgcccttcgggggaaagatttatcgcctttagagcggcccgcgtctgattagctagttggtgaggtaaa

SEQ ID NO: 723 - DNA, 225 bp, Unknown
  Encodes 16S rRNA from Clostridium XlVa
agagtttgatcatggctcaggatgaacgctggcggcgcgcataacacatgcaagtcgaacggagtcacattgaaacctagtgatttgtgacttagtggcggacgggtgagtaacgcgtgggtaacctgcctggtattgggggacaacagttagaaatgactgctaataccgcatacgacatccggagggcatcctctggatgggaaaggatttatccgatatcag

SEQ ID NO: 724 - DNA, 204 bp, Unknown
  Encodes 16S rRNA from Prevotella
agagtttgatcctggctcaggatgaacgctagctacaggctttggtcaatgggcggaagcctgaaccagccaagtagcgtgcaggatgacggccctatgggttgtaaactgcttttatgcgggaataaagaggctcacgtgtgggctgttgcatgtaccgcatgaataaggaccggctaattccgtgccagcagccgcggtaat

SEQ ID NO: 725 - DNA, 225 bp, Unknown
  Encodes 16S rRNA from Desulfovibrio
agagtttgatcatggctcagattgaacgctggcggcgtgcttaacacatgcaagtcgaacgcgaaaggggcttcggccccgagtagagtggcgcacgggtgagtaacgcgtggataatctgcccctgcaactggaatagcgactggaaacggtcgataataccggatacgcccttgttgaactatgaggggaaaggagacctctgcttgcaagtttccgtgcagg

SEQ ID NO: 726 - DNA, 225 bp, Unknown
  Encodes 16S rRNA from Coraliomargarita
agagtttgatcatggctcagagtgaacgctggcggcgtggctaagacatgcaagtcgggcggttgtgcgccttcgggtgtacaatagcggcaaacgggtgagtaacacgtaagtaacctgcccttaagactgggatagcccagcgaaagttggggtaataccggatgaggacctttagcgcatgttaagggatcgaaaggtatgagaagacgcttaaggaggggc

SEQ ID NO: 727 - DNA, 225 bp, Unknown
  Encodes 16S rRNA from Eubacterium
agagtttgatcatggctcaggatgaacgctggcggcgtgcttaacacatgcaagtcgagcgagaaatgactgacggattcttcggatgacggaggtcatggacagcggcggacgggtgagtaacgcgtgggcaacctgcccttaactgagggatagccgagggaaacttcgtgtaatacctcataacgcattttgaccgcatgatcgaaatgccaaagatttatc

SEQ ID NO: 728 - DNA, 225 bp, Unknown
  Encodes 16S rRNA from Sphingomonas
agagtttgatcatggctcagagcgaacgctagcggcatgcttaacacatgcaagtcgaacgagggaagttgattgagtagcaatacgatttcaatggaacgagtggcaaacgggtgagtaatatattggaacttgcccagtagtgggggacaacagttggaaacgactgctaataccgcataacgcagagatgcgaaagccgaaaggcgctattggagaggccaa

SEQ ID NO: 729 - DNA, 225 bp, Unknown
  Encodes 16S rRNA from Prevotella
agagtttgatcctggctcaggatgaacgctagctacaggcttaacacatgcaagtcgaggggtaacatgaagaaagcttgctttctttgatgacgaccggcgcacgggtgagtatcgcgtatccaacctgcccataagtagggaatagccttgcgaaagtaagattaatgccctatggtttccgtcgtagacatcttagatggaataaagatttatcgcttatgg

SEQ ID NO: 730 - DNA, 225 bp, Unknown
  Encodes 16S rRNA from Clostridium IV
agagtttgatcctggctcaggacgaacgctggcggtatgcctaacacatgcaagtcgaacgggtgttgaagagcttgctcttcttctactagtggcggacgggtgagtaacgcgtgagtaatctgcctcaaagtgggggataacacttagaaatgagtgctaataccgcgtaatgtgctaacttcgcatgaagtctgcaccatggtttttcgctttgagatgagc

SEQ ID NO: 731 - DNA, 225 bp, Unknown
  Encodes 16S rRNA from Paraprevotella
agagtttgatcatggctcaggatgaacgctagcggcaggcttaacacatgcaagtcgaggggcagcgagtcggtagcaatactgatgtcggcgaccggcgcacgggtgagtaacgcgtatgcaacctttcccagacagggggatagcccagggaaacttggattaataccccgtaggccgagggatggcatcgtccttcggttaaagttccggcggtctggggtg

SEQ ID NO: 732 - DNA, 225 bp, Unknown
  Encodes 16S rRNA from Ruminococcus
agagtttgatcctggctcaggacgaacgctggcggcacgcttaacacatgcaagtcgaacggagttaaaggagcttgctcctttaacttagtggcggacgggtgagtaacacgtgagcaacctgccttacagagaggaataatgattggaaacggtcactaatacctcataaaatatctatactgcatggtataggatatcaaagatttatcgctgtaagatggg

SEQ ID NO: 733 - DNA, 225 bp, Unknown
  Encodes 16S rRNA from Saccharofermentans
agagtttgatcatggctcaggatgaacgctggcggcgcatttaagacatgcaagtcgaacgaagaatttgcaccgaatgaaagatgaagattcatcagattctggatttcaccgtaaattcttagtggcggacgggtgagtaatacgtagataatctgccttctagagggaaataacagagagaaatttctgctaatgtcccataagaccacactatggcatctt

SEQ ID NO: 734 - DNA, 225 bp, Unknown
  Encodes 16S rRNA from Clostridium III
agagtttgatcctggctcaggacgaacgctggcggcgtgcctaacacatgcaagtcgagcggagccatccgaaagatcccttcggggtgattttggtgaagcttagcggcggacgggtgagtaacgcgtgagtaacctgcccattagtggggaataacacagagaaatttgtgctaataccgcataccgatgcgggagggcatcctcctgtattgaaagatttat

SEQ ID NO: 735 - DNA, 225 bp, Unknown
  Encodes 16S rRNA from Clostridium III
agagtttgatcatggctcaggacgaacgctggcggcgtgcctaacacatgcaagtcgaacgaacgaggtagcaatactgagttagtggcggacgggtgagtaatgcatgagcaacctacctcatacagggggatagcacttagaaatgagtggtaataccgcataataaccatacatggcatcatgtaaggaggaaaggaggaatccggtaagagatgggctcat

SEQ ID NO: 736 - DNA, 225 bp, Unknown
  Encodes 16S rRNA from Turicibacter
agagtttgatcatggctcaggatgaacgctggcggcgtgcctaatacatgcaagtcgaacgagagtacttgtactcgagtggcgaacgggtgagtaacacgtaggtaacctgcctttcagtttgggatacccagaggaaactttggctaataccggataactggtctggaggcatctccggatcctaaaaggggctccaaagcctcgctgattgatggacctgcg

SEQ ID NO: 737 - DNA, 225 bp, Unknown
  Encodes 16S rRNA from Prevotella
agagtttgatcatggctcaggatgaacgctagctacaggcttaacacatgcaagtcgaggggcagcatgtatctggcttgccagatatgatggcgaccggcgcacgggtgcgtaacgcgtatccaacctgccgtttacccggggacagcctcgcgaaagcgagattaatacccgatgttgtgcgtattccgcatggtgtgcgcaccaaaggtttttccggtaagc

SEQ ID NO: 738 - DNA, 225 bp, Unknown
  Encodes 16S rRNA from Clostridium XlVa
agagtttgatcctggctcaggatgaacgctggcggcgtgcctaacacatgcaagtcgagcggggatgcgccaaagatgatgactcgtctgattcttagcgcatcttagcggcggatgggtgagtaacgcgtggacaacctgcccgcaacagggggataacagctggaaacggctgataataccgcatatgcacacgtggccgcatggccatgggtggaaagattt

SEQ ID NO: 739 - DNA, 225 bp, Unknown
  Encodes 16S rRNA from Fusibacter
agagtttgatcctggctcaggatgaacgctggcggcgtgcctaacacatgcaagtcgagcgagaaatcgctcaatgatctttcgggtgatttgagcgatggaaagcggcggacgggtgagtaacgcgtaggtaacctgccccatacagagggatagccactggaaacggtgattaatacctcataacaccggaatatcgcatggtataccggtcaaagtttttcg

SEQ ID NO: 740 - DNA, 225 bp, Unknown
  Encodes 16S rRNA from Clostridium XlVa
agagtttgatcctggctcaggatgaacgctggcggcgtgcctaacacatgcaagtcgaacgaagctctcttttggaacccttcggggtgaagaaggagatgactgagtggcggacgggtgagtaacgcgtgggtaacctgccctgtacagggggacaacagttagaaatgactgctaataccgcataagcgcacagcaccgcatggtgccgtgtgaaaagccttt

SEQ ID NO: 741 - DNA, 225 bp, Unknown
  Encodes 16S rRNA from Clostridium IV
agagtttgatcatggctcaggacgaacgctggcggcacgcttaacacatgcaagtcgaacggagttaatgaagcttgctttattaacttagtggcggacgggtgagtaacacgtgagcaacctgccttacagagaggaataatgattggaaacgatcactaatacctcataacatatttgaatcgcatggtttggatatcaaagatttatcgctgtaagatgggc

SEQ ID NO: 742 - DNA, 225 bp, Unknown
  Encodes 16S rRNA from Rummeliibacillus
agagtttgatcatggctcaggacgaacgctggcggcgtgcctaatacatgcaagtcgagcgaatgacgaggagcttgctcctctgatttagcggcggacgggtgagtaacacgtgggtaacctgccctgtagactgggataacttcgggaaaccggagctaataccggataattcttttaacctcatggttttaagctgaaaggcgcttcggcgtcactacagga

SEQ ID NO: 743 - DNA, 225 bp, Unknown
  Encodes 16S rRNA from Mogibacterium
agagtttgatcctggctcaggatgaacgctggcggcgtgcctaatacatgcaagtcgagcgagaatcaatagatcagcgatttatcaaagagacattgaggaaagcggcggacgggtgagtaacgcgtaggcaacctgcccctggcagagggatagccattggaaacgatgattaaaacctcataacgccggaagcacacatgtgctatcggccaaagatttatc

SEQ ID NO: 744 - DNA, 225 bp, Unknown
  Encodes 16S rRNA from Bacteroides
agagtttgatcatggctcaggatgaacgctagcgacaggcctaacacatgcaagtcgagggagaagttggaggtagcttgctactgaagatggaaaccggcgcacgggtgcgtaacaggtatgcaatctgtcctataccggaggatagcccactgaaaggtggattaatactccatgtgccactgcggggcatcctatggtggtgaaacttgagggtatagggtg

SEQ ID NO: 745 - DNA, 225 bp, Unknown
  Encodes 16S rRNA from Pelospora
agagtttgatcatggctcaggatgaacgctggcggcgcgcttaacacatgcaagtcgaacggaatgattgacttcggtcatgaattcagtggcggacgggtgagtaacacgtggataacttgccttttagtgggggatagctgagagaaatctcaattaataccgcataacgtgatttattcgcatggatagattaataaaggtgaaaatcgctaaaagataggt

SEQ ID NO: 746 - DNA, 225 bp, Unknown
  Encodes 16S rRNA from Eggerthella
agagtttgatcatggctcaggatgaacgctggcggcgtgcttaacacatgcaagtcgaacgattaaaccacttcggtggatatagagtggcgaacgggtgagtaacacgtgggcaacctgcccctcacaccgggacaactattggaaacgatagctaataccggatactccgatcgcgtggcatcacgctttcgggaaagcccagacggtgagggatgggcccgc

SEQ ID NO: 747 - DNA, 225 bp, Unknown
  Encodes 16S rRNA from Eubacterium
agagtttgatcctggctcaggatgaacgctggcggcgtgcttaacacatgcaagtcgaacggaacttatcttctgaagttttcggatggacgaaggtaagtttagtggcggacgggtgagtaacgcgtgggtaacctgccctgtacagggggataacagttagaaatgactgttaataccgcataagaccacagcaccgcatggtgcaggggtaaaagctgcgac

SEQ ID NO: 748 - DNA, 225 bp, Unknown
  Encodes 16S rRNA from Blautia
agagtttgatcatggctcaggatgaacgctggcggcgtgcctaacacatgcaagtcgaacggagcttacttttttaatacttcggtaagcgagaagtaagcttagtggcggacgggtgagtaacgcgtggagaacctgccctgtactgggggataacagtgagaaatcactgctaataccgcataagcgcacggagccgcatggcccagtgtgaaaaactccggt

SEQ ID NO: 749 - DNA, 225 bp, Unknown
  Encodes 16S rRNA from Clostridium XlVb
agagtttgatcatggctcaggatgaacgctggcggcgtgcctaacacatgcaagtcgagcgaagttttaggaaagcttgctttccgaagaacttagcggcggacgggtgagtaacgtgtgggtaacttgccctatgcagagggataacagtgagaaatcactgctaatacctcataagctcacactttcacatgggagagtgagaaaagatttatcggcatagga

SEQ ID NO: 750 - DNA, 225 bp, Unknown
  Encodes 16S rRNA from Ehrlichia
agagtttgatcatggctcagaacgaacgctggcggtatgctttaaccatgcaagtcgaacgagaaagggtagcaatacctgagtaaagtggcaaacgggtgagtaacacacaggaatctacccagtagaggggaataagcactggaaacggtgtctaatactccatacgccggtatagcaatatatcgggaaagggctagtagcaatattagttcactattggat

SEQ ID NO: 751 - DNA, 225 bp, Unknown
  Encodes 16S rRNA from Eubacterium
agagtttgatcctggctcaggatgaacgctggcggcgtgcttaacacatgcaagtcgagcgagaatcgaggaaacgatacttcggtaaagcggaatcgaggacagcggcggacgggtgagtaacgcgtgggcaacctgccccttactggtggatagccgcgggaaactgcgagtaatacaccataatgcatcgatgagacatctcaatgatgccaaagatttatc

SEQ ID NO: 752 - DNA, 154 bp, Unknown
  Encodes 16S rRNA from Prevotella
agagtttgatcatggctcagattgaacgctggcggcaggcttaacacatgcaagtcgtacggtaacagaggggaataaagtgaggtacgtgtacctttttgtatgtaccctatgaataaggaccggctaattccgtgccagcagccgcggtaat

SEQ ID NO: 753 - DNA, 225 bp, Unknown
  Encodes 16S rRNA from Clostridium XlVa
agagtttgatcatggctcaggatgaacgctggcggcgtgcctaacacatgcaagtcgagcggagtttaggggaaggcggattcgtccaacggaacctaaacttagcggcggatgggtgaggaacgcgtggataacctaccgtgcacagggggataacagttggaaacgactgttaataccgcatatgctcacagtaccgcatggtacagggaggaaagatttatc

SEQ ID NO: 754 - DNA, 225 bp, Unknown
  Encodes 16S rRNA from Treponema
agagtttgatcatggctcagaacgaacgctggcggcgcgtcttaagcatgcaagtcgaacggcaagatggtagcttgctactatcctagagtggcggactggtgagtaacacgtgggtgacgtacccttcagacggggatagctggtagaaatatcagataataccggatacgattctgtaagttagaggtacagaaggaaaggagctatggcttcgctgaagga

SEQ ID NO: 755 - DNA, 225 bp, Unknown
  Encodes 16S rRNA from Hydrogenoanaerobacterium
agagtttgatcatggctcaggataaacgctggcggcgcacataagacatgcaagtcgaacgggaactttattgaagttatctgatataaagttctagtggcggactggtgagtaatgtataagcaacctgcctataagaggggaataacagtgagaaatcattgctaataccgcataagctgtgagaatggcatcattcaaacagaaaaggaagcaattccgctt

SEQ ID NO: 756 - DNA, 225 bp, Unknown
  Encodes 16S rRNA from Selenomonas
agagtttgatcatggctcaggacgaacgctggcggcgtgcttaacacatgcaagtcgaacggggcgattgaaagcttgcttttatgagcctagtggcaaacgggtgagtaacgcgtgggcaacctgccggaaagatggggacaacatcccgaaaggggtgctaataccgaatgttgtatataaggcgcatgccttgtatattaaaggatctaatccgctttccga

SEQ ID NO: 757 - DNA, 225 bp, Unknown
  Encodes 16S rRNA from Saccharofermentans
agagtttgatcatggctcaggatgaacgctggcggcgtgcataacacattcaagtcgaacggactcaggggcttcggccccgaaagtcagtggcggacgggtgagtaacgcgtgagcaacctgcctccggaagagggataacagttggaaacgactgctaataccgcataacactgcgagtacgcatgtacatgcagtcaaaggagcaatccgaccggagatggg

SEQ ID NO: 758 - DNA, 225 bp, Unknown
  Encodes 16S rRNA from Clostridium IV
agagtttgatcctggctcaggattaacgctggcggcgtgcataacacattcaagtcgaacggacggaagagcttcggttcttacgtcagtggcggacgggtgagtaacgcgtgagcaatctgccctttacagcgggataacacagagaaatttgtgctaatacggcataacatatcggagtcgcatggcattggtatcaaagatttatcggtaaaggatgagctc

SEQ ID NO: 759 - DNA, 225 bp, Unknown
  Encodes 16S rRNA from Clostridium sensu stricto
agagtttgatcatggctcaggacgaacgctggcggcgtgcctaacacatgcaagtcgagcggggactgcgcgacggacctgaagatttcggttggatgggaagatgcacagttctagcggcggacgggtgagtaacgcgtgagcaacctgtcccttacagggggataacacagcgaaagttgtactaataccgcataagaccacggcatcacatggtggtggggt

SEQ ID NO: 760 - DNA, 225 bp, Unknown
  Encodes 16S rRNA from Anaerovorax
agagtttgatcatggctcaggatgaacgctggcggcgtgcctaacacatgcaagtcgagcgggagtataccaaacagagattcgtcgaagtaaggtatatgagagcggcggacgggtgagtaacgcgtaggtaacctaccttaagctgagggataacccagggaaacttgggataataccacataacgcggtgaagtcacatggctttaccgccaaagatttatc

SEQ ID NO: 761 - DNA, 225 bp, Unknown
  Encodes 16S rRNA from Spirochaeta
agagtttgatcatggctcagaacgaacgctggcggcgcgttttaagcatgcaagtcgagcggtaagccggagcaatccggcctagagcggcggacgggtgagtaacacgtggataatctggcctacagtttgggatagcctggtgaaagccaggataataccggatacgacagttttaacagaagttaagattgggaaaggggctaaggcctcgctgaaggatga

SEQ ID NO: 762 - DNA, 225 bp, Unknown
  Encodes 16S rRNA from Brevundimonas
agagtttgatcatggctcaggacgaacgctggcggcgtgcttcatacatgcaagtcgaacgagaatctctagcttgctagagaggaaagtggcggacgggtgagtaatatgtagagaatctgccctagagagggggacaacagagggaaactcctgctaataccccatatgagcgtacctgtgatggtattcttgaaaactccggtgctctaggatgagtctgca

SEQ ID NO: 763 - DNA, 225 bp, Unknown
  Encodes 16S rRNA from Eubacterium
agagtttgatcctggctcaggatgaacgctggcggcgtgcctaacacatgcaagtcgagcgagaaacttttgtgatgaagcttcggtagattctttaaagtggaaagcggcggacgggtgagtaacgcgtaggcaacctgcccttagcagggggatagccattggaaacgatgattaaaaccccataatgcagagagttcacatgtattttctgccaaagattta

SEQ ID NO: 764 - DNA, 225 bp, Unknown
  Encodes 16S rRNA from Clostridium XlVa
agagtttgatcatggctcaggatgaacgctggcggcgtgcctaacacatgcaagtcgaacggagttgtttctatccgacagatcatcttcggatgtgaagtcaccagaaacgcttagtggcggacgggtgagtaacgcgtgggcaacctgccctgcacagggggatagcggttggaaacgaccggtaataccgcataccttgtatttaacgcatgttagatataa

SEQ ID NO: 765 - DNA, 225 bp, Unknown
  Encodes 16S rRNA from Anaerovorax
agagtttgatcctggctcaggatgaacgctggcggcgtgcctaacacatgcaagtcgagcgagaatcttagaagtgaagtttcgatggatcttttaagaggagagcggcggacgggtgagtaacgcgtaggcaacctgcctcacactgagggatacttccgggaaactggaactaatacctcataacgcgagagtttcacatgttactctcgccaaagatttatc

SEQ ID NO: 766 - DNA, 225 bp, Unknown
  Encodes 16S rRNA from Ruminococcus
agagtttgatcctggctcaggacgaacgctggcggcacgcttaacacatgcaagtcgaacggagtattttggagcttgctctgagatgcttagtggcggacgggtgagtaacacgtgagcaacctgccttcaagtgcggaatagcttctggaaacggatggtaataccgcataatgttatctggccgcatgaccggataaccaaagaaattcgcttgaagatggg

SEQ ID NO: 767 - DNA, 225 bp, Unknown
  Encodes 16S rRNA from Papillibacter
agagtttgatcatggctcaggacgaacgctggcggcgtgcttaacacatgcaagtcgaacggagttatttccgacacggagccacttgagagagtggttgcgtgttggggataacttagtggcgaacgggtgagtaacgcgtaagcaatctgccttacagagggggataacgtttggaaacgaacgctaataccgcataacgtcatgaagaggcatctttttatg

SEQ ID NO: 768 - DNA, 225 bp, Unknown
  Encodes 16S rRNA from Clostridium IV
agagtttgatcatggctcaggatgaacgctggcggcgcgcctaacacatgcaagtcgaacggagttatcttattagatcccttcggggtgacgattttttaacttagtggcgaacgggtgagtaacgcgtgagtaacctgccttcaagagggggacaacagttggaaacgactgctaataccgcataacataacgaagccgcatgactttgttatcaaaggagca

SEQ ID NO: 769 - DNA, 225 bp, Unknown
  Encodes 16S rRNA from Hydrogenoanaerobacterium
agagtttgatcatggctcaggatgaacgctggcggcgtgcctaacacatgcaagtcgaacggaactttttacggacaagacttcggtcaagtctgtttcaagtttagtggcggacgggtgagtaacgcgtgagcaacctgcctttcagagggggataacgttcggaaacgatcgctaataccgcataacatagggatatcgcatggtaaccctatcaaagatttt

SEQ ID NO: 770 - DNA, 225 bp, Unknown
  Encodes 16S rRNA from Asaccharobacter
agagtttgatcatggctcaggatgaacgctggcggcgtgcttaacacatgcaagtcgaacgagaaagcaccttcgggtgtgagtagagtggcgaacgggtgagtaacacgtgagcaacctgcctttcacatcgggataacctatggaaacgtaagctaataccgaatactccatttccttcgcatgttggatctgggaaagctttagcggtgaaagatgggctcg

SEQ ID NO: 771 - DNA, 225 bp, Unknown
  Encodes 16S rRNA from Clostridium XlVa
agagtttgatcctggctcaggatgaacgctggcggcgtgcttaacacatgcaagtcgaacgaagcagctttgaaggagatttcggtcaatggataagctgacttagtggcggacgggtgagtaacgcgtgggcaacctgcctcatggagggggacaacagttggaaacgactgctaataccgcataagaccaagcatcgcatgatgcaatggtaaaagatttatc

SEQ ID NO: 772 - DNA, 225 bp, Unknown
  Encodes 16S rRNA from Rhodocista
agagtttgatcctggctcagaacgaacgctggcggcaggcttaacacatgcaagttgaacggtattgtgaagtgcttgcactgcacaagagagtagcgcactggtgagtaacacgtgggaacatgccctaaagtacgggatagcgtctggaaacggacgataatacggtatacgccctgagggggaaagatttatcgctttaggattggcccgcggaagattagg

SEQ ID NO: 773 - DNA, 225 bp, Unknown
  Encodes 16S rRNA from Clostridium XlVa
agagtttgatcatggctcaggatgaacgctggcggcgtgcctaacacatgcaagtcgaacgagcgccttcgggtgcgagtggcggacgggtgagtaacgcgtgggtaacctgccttacacagggggacaacagttggaaacgactgctaataccgcataagcccacggaaccgcatggttctgtgagaaaagatttatcggtgtaagatggacccgcgtctgatt

SEQ ID NO: 774 - DNA, 225 bp, Unknown
  Encodes 16S rRNA from Beijerinckia
agagtttgatcatggctcagaacgaacgctggcggcaggcttaacacatgcaagtcgaacggaacatagggtgcttgcactttatgtcagtggcgcacgggtgagtaacgcgtaggaacctgtcttttagcctgggatagcctctggaaacggagggtaaaaccggatgagccctgagggggaaatgagcaatcagctgaaagaggggcctgcgttagattaggc

SEQ ID NO: 775 - DNA, 225 bp, Unknown
  Encodes 16S rRNA from Lactobacillus
agagtttgatcctggctcaggacgaacgctggcggcgtgcctaatacatgcaagtcgaacgaagctttctttcaccgaatgcttgcattcaccgaaagaagcttagtggcgaacgggtgagtaacacgtaggcaacctgcccaaaagagggggataacacttggaaacaggtgctaataccgcataaccatgaacaccgcatgatgttcatgtaaaagacggctt

SEQ ID NO: 776 - DNA, 225 bp, Unknown
  Encodes 16S rRNA from Cryptanaerobacter
agagtttgatcatggctcaggacgaacgctggcggcatgcctaacacatgcaagtcgaacggaataggattggttgtagcgatactttcgatcctatttagtggcgaacgggtgagtaacacgtgagcaacctgccttttacacagggataacagccggaaacggctgctaataccggataagaccacaccgaggcatctcggaggggtcaaagcgatttagcgg

SEQ ID NO: 777 - DNA, 225 bp, Unknown
  Encodes 16S rRNA from Prevotella
agagtttgatcctggctcaggatgaacgctagctacaggcttaacacatgcaagtcgaggggcatcactgggttggcttgccatccctggtggcgaccggcgcacgggtgagtaacgcgtatccaacctgccccgaaccgcggtatagcccgccgaaaggcggattaatcccgcatgtggtcgtgagatgacatctgaccacgactaaaggtattttccggttcg

SEQ ID NO: 778 - DNA, 225 bp, Unknown
  Encodes 16S rRNA from Anaerovibrio
agagtttgatcctggctcaggacgaacgctggcggcgtgcttaacacatgcaagtcgaacggagcgaagaagagcttgctctttggagcttagtggcaaacgggtgagtaacgcgtaggcaacctgcccttcagatggggacaacacctcgaaaggggtgctaataccgaatgacgtgcattggtcgcatgaccgatgcaccaaaggccgggcaaccggtcactg

SEQ ID NO: 779 - DNA, 225 bp, Unknown
  Encodes 16S rRNA from Anaerovorax
agagtttgatcatggctcaggatgaacgctggcggcgtgcctaacacatgcaagtcgagcgggaatctctaaagcagcttgctgcggaagagaggatagcggcggacgggtgagtaacgcgtaggtaagctgccccttgcagaaggatagcctcgggaaactgggattaatacttcataacacggctggtccgcatgaaccggccgtcaaagatttatcggcaag

SEQ ID NO: 780 - DNA, 225 bp, Unknown
  Encodes 16S rRNA from Lachnospiracea incertae sedis
agagtttgatcctggctcaggatgaacgctggcggcgtgcttaacacatgcaagttgaacgaagaagtcagagtgcttgcactcaggcttactgagtggcggacgggtgagtaacgcgtgggtaacctgcctcacacagggggataacagtcggaaacgactgctaataccgcataagcgcacagtgccgcatgacacagtgtgaaaaactccggtggtgtgaga

SEQ ID NO: 781 - DNA, 225 bp, Unknown
  Encodes 16S rRNA from Enterorhabdus
agagtttgatcctggctcaggatgaacgctggcggcgtgcctaacacatgcaagtcgaacggttaaaccgccctcgggcggacataaagtggcgaacgggtgagtaacacgtgaccaacctgccccgcgcaccgggacagccccccgaaagggggattgataccggatactccgccgggcccgcatgggcccggcgggaaagctccggcggcgcgggatggggtc

SEQ ID NO: 782 - DNA, 225 bp, Unknown
  Encodes 16S rRNA from Clostridium XlVb
agagtttgatcctggctcaggatgaacgctggcggcgtgcataacacattcaagtcgaacgggacgttccgagtagcaatatgagggatgtttagtggcggacgggtgagtaacgcgtgagtaacctgcctgtgtgagggggacaacagatcgaaaggcctgctaataccgcatgacgtatggagatcgcatggttttcataccaaagatttatcgcacacagat

SEQ ID NO: 783 - DNA, 225 bp, Unknown
  Encodes 16S rRNA from Selenomonas
agagtttgatcatggctcaggacgaacgctggcggcgtgcttaacacatgcaagtcgaacgaggtgattgaaagcttgcttttgagaaccgagtggcaaacgggtgagtaacgcgtagacaacctgccgcaaagatggggacaacagtccgaaaggactgctaataccgaatgttgtcagattcccgcatgggagactgattaaagatggcctctacttgtaagc

SEQ ID NO: 784 - DNA, 225 bp, Unknown
  Encodes 16S rRNA from Eubacterium
agagtttgatcatggctcaggacgaacgctggcggcgtgcttaacacatgcaagtcgaacgaagcttgatttcagatttcttcggaatgacgaatgatatgactgagtggcggacgggtgagtaacgcgtgagcaacctaccctttggattgggatagcgtttggaaacgaacggtaataccgaataaagtatacggatggcatcatctgtataccaaagctccg

SEQ ID NO: 785 - DNA, 225 bp, Unknown
  Encodes 16S rRNA from Thermotalea
agagtttgatcatggctcaggatgaacgctggcggcgtgcctaacacatgcaagtcgagcgagaagttcgcaacggaagcttcggccgaagatgcggatggacagcggcggacgggtgagtaacgcgtaggtaagctgccctatgcacagggatagcctcgggaaactgggattaatacctgatgaagcggtaggtacacatgtactaatcgccaaagatttatc

SEQ ID NO: 786 - DNA, 225 bp, Unknown
  Encodes 16S rRNA from Enterorhabdus
agagtttgatcctggctcaggatgaacgctggcggcgtgcctaacacatgcaagtcgaacggttaagccggcttcggccgggaatacagtggcgaacgggtgagtaacacgtgaccaacctgccccccgcaccgggacagccccgcgaaagcgcggttaataccggataggcccccgcgcccgcatgggagcggggggaaagcccaggcggcgggggatggggtc

SEQ ID NO: 787 - DNA, 225 bp, Unknown
  Encodes 16S rRNA from Clostridium III
agagtttgatcatggctcaggacgaacgctggcggcgtgcctaacacatgcaagtcgagcgatgatcggaggatgagaccttcgggtggattcttccgagattagcggcggatgggtgagtaacgcgtgggcaatctgccctccacagggggataacacagggaaacttgtgctaataccgcataacatcttcgggaggcatcttctgaagatcaaaggagcgat

SEQ ID NO: 788 - DNA, 225 bp, Unknown
  Encodes 16S rRNA from Acetanaerobacterium
agagtttgatcctggctcaggacgaacgctggcggcgcgcctaacacatgcaagtcgaacggagatgaaaaaagcttgctttaatcatcttagtggcggacgggtgagtaacacgtgagcaacctgcctttcagagggggataacgtttggaaacgaacgctaataccgcataatgtatacggatggcatcgtctgtataccaaaggagcaatccgctgaaagat

SEQ ID NO: 789 - DNA, 225 bp, Unknown
  Encodes 16S rRNA from Treponema
agagtttgatcctggctcagaacgaacgctggcggcgcgtcttaagcatgcaagtcgggcgggattcatgtgcttgcacatgatgagagcggcggactggcgaggagcgcgtgggtgacgcaccccccggacggggacagccggcagaaatgccgggtgataccggatgaggtcccccttgttggaggagggggaggaaaggggcttcggccccgccgggggagc

SEQ ID NO: 790 - DNA, 225 bp, Unknown
  Encodes 16S rRNA from Clostridium XlVa
agagtttgatcatggctcaggatgaacgctggcggcgtgcctaacacatgcaagtcgaacggtgaaaggggacggaaccctccggggggaagtaacctggaacagtggcggacgggtgagtaacgcgtggataacctgcctcatacagggggataacagagagaaatcactgctaataccgcataagcgcacgagggccgcatggcccggtgtgaaaaactccgg

SEQ ID NO: 791 - DNA, 164 bp, Unknown
  Encodes 16S rRNA from Enterorhabdus
agagtttgatcatggctcaggatgaacgctggcggcgtgcctaacacatgcaagtcgaacgaagcacttttgcattcgaggaagacagcgtataaataaatgcgctatttgacgttagagtgtgaataagcaccggcaaactccgtgccagcagccgcggtaat

SEQ ID NO: 792 - DNA, 225 bp, Unknown
  Encodes 16S rRNA from Prevotella
agagtttgatcatggctcaggatgaacgctagctacaggcttaacacatgcaagtcgaggggcagcatgaacttagcttgctaagtttgatggcgaccggcgcacgggtgagtaacgcgtatccaacctgccccgaggtcagggacagcccggcgaaagtcggattaatacctgatggtctctttagatggcatctgacgaggagtaaagattcatcgccttggg

SEQ ID NO: 793 - DNA, 225 bp, Unknown
  Encodes 16S rRNA from Desulfovibrio
agagtttgatcctggctcaggacaaacgctggcggcgtgcctaacacatgcaagtcgaacgagcccttcggggctagtggcagacgggtgagtaacgcgtaggtaatgtacctcttcgctggggataccgttccgaaaggaacgttaataccgaatgaattcatcgggcggcatcgcttgatgaataaaccgcaagggcgaggagatcagcttgcgtactatcag

SEQ ID NO: 794 - DNA, 225 bp, Unknown
  Encodes 16S rRNA from Aminobacter
agagtttgatcatggctcagaacgaacgctggcggcaggcttaacacatgcaagtcgagcgccccgcaaggggagcggcagacgggtgagtaacgcgtgggaatctacccatctctacggaataactcagggaaacttgtgctaataccgtatacgcccttcgggggaaagatttatcggagatggatgagcccgcgttggattagctagttggtggggtaatgg

SEQ ID NO: 795 - DNA, 225 bp, Unknown
  Encodes 16S rRNA from Clostridium IV
agagtttgatcctggctcaggacgaacgctggcggcgtgcctaacacatgcaagtcgaacggagatattcgaatgagattcgttgattttgaatatcttagtggcggacgggtgagtaacgcgtgagtaacctgccgatgagtgtggaataacgttctgaaaagaacgctaataccgcataacatatttttgccgcatgacagaagtatcaaagatttatcgctc

SEQ ID NO: 796 - DNA, 225 bp, Unknown
  Encodes 16S rRNA from Rikenella
agagtttgatcatggctcaggatgaacgctagcggcaggcttaacacatgcaagtcgaggggcagcgcgaggtagcaatactttggcggcgaccggcgcaagggtgcgtaacgcgtgagcaacttgcccgtaacaggaggataaccggaggaaactccgactaatactgcgtagaaataattggtggcatcaccgagtgtttaaaggcgaaagccggttacggat

SEQ ID NO: 797 - DNA, 225 bp, Unknown
  Encodes 16S rRNA from Gordonibacter
agagtttgatcatggctcaggatgaacgctggcggcgtgcctaacacatgcaagtcgaacgattaaaccgccttcgggcggatataaagtggcgaacgggtgagtaacacgtaaccaacctaccccgcacactgggacagcctcgcgaaagcgggattaataccagatactccttatgttacgcatgttttataagggaaagcttttgcggtgcgggatggggtt

SEQ ID NO: 798 - DNA, 225 bp, Unknown
  Encodes 16S rRNA from Papillibacter
agagtttgatcctggctcaggatgaacgctggcggcgtgcataacacattcaagtcgaacgaagcatatggttggaagttttcggacggaagagcatatgacttagtggcggacgggtgagtaacgcgtgagcaaccttcctgcatgtgagggataacacagggaaacttgtgctaataccgcataacgcatgactgtcgcatggcagacatgccaaagaataat

SEQ ID NO: 799 - DNA, 225 bp, Unknown
  Encodes 16S rRNA from Syntrophococcus
agagtttgatcatggctcaggatgaacgctggcggcgtgcctaacacatgcaagtcgaacgaggctcttccctttgaagtttcgacagattagggaagatcaccgagtggcggatgggtgagtaacgcgtggagaacctgcccccatcagggggataacaactggaaacggttgataataccgcatatatgataggaccgcatgattctatcaggaaagatttat

SEQ ID NO: 800 - DNA, 225 bp, Unknown
  Encodes 16S rRNA from Clostridium sensu stricto
agagtttgatcatggctcaggatgaacgctggcggcgtgtttaatacatgcaagtcgaacgaggtatagcaatataccgagtggcgaacgggtgagtaacacgtgagcaacctgccctatacagggggacaacagctggaaacggctgctaataccgcataagaccacagcatcgcatgatgcaggggtaaaaggctacggtcagtataggatgggctcgcgcac

SEQ ID NO: 801 - DNA, 154 bp, Unknown
  Encodes 16S rRNA from Hahella
agagtttgatcatggctcagattgaacgctggcggcaggcttaacacatgcaagtcgtacggtaacagaggaagacagcacgtaaataaacgtgttatttgacgttagagtgtgaataagcaccggcaaactccgtgccagcagccgcggtaat

SEQ ID NO: 802 - DNA, 225 bp, Unknown
  Encodes 16S rRNA from Vampirovibrio
agagtttgatcatggctcaggacgaacgctggcggtgtgcctcatacatgcaagtcgaacgataaggtttcttcggaaatacataagtggcggacgggtgagtacaacataggaaatctgccctaaactgggggacaacagagggaaacttctgctaataccccatacgagctagcttgaaatagctatcttgaaagctccggcggtttaggatgagcctgtgcc

SEQ ID NO: 803 - DNA, 225 bp, Unknown
  Encodes 16S rRNA from Coprococcus
agagtttgatcatggctcaggatgaacgctggcggcgtgcctaacacatgcaagtcgaacggggtgtcaatcttcggaaagacacttagtggcggacgggtgagtaacgcgtgggtaacctgcctcatacagggggatagcagttggaaacgactgataataccgcataagcgcacagtaccgcatggtacagtgtgaaaaactccggtggtatgagatggaccc

SEQ ID NO: 804 - DNA, 225 bp, Unknown
  Encodes 16S rRNA from Coraliomargarita
agagtttgatcatggctcagagtgaacgctggcgacgtggctaagacatgcaagtcgagcgagaaggtgccttcgggtgccggaaagcggcaaacgggtgcgtaacacgtaagtaacctgcccttaagacgggaatagcttgatgaaaattgagataatgcccgatattaaattcttccgcatggaagaggtttgaaaggtttgtgatggcgcttaaggaggggc

SEQ ID NO: 805 - DNA, 225 bp, Unknown
  Encodes 16S rRNA from Clostridium III
agagtttgatcctggctcaggacgaacgctggcggcgtgcctaacacatgcaagtcgagcggagccatcttgaagatcccttcggggtgatttaggggaagcttagcggcggacgggtgagtaacacgtgagtaacctgcccttatgaggaggataacacaccgaaaggtgtgctaatactgcataatatatatttttcgcatggagaatatatcaaagatttat

SEQ ID NO: 806 - DNA, 225 bp, Unknown
  Encodes 16S rRNA from Clostridium XlVa
agagtttgatcatggctcaggatgaacgctggcggcgtgcctaacacatgcaagtcgaacgaagctttgcttatgattttttcggaatgattaagtgaatgactgagtggcggacgggtgagtaacgcgtggataacctgccctttgcagggggataacagccggaaacgactgctaataccgcataagcgcacagcaccgcatggtgcagtgtgaaaaactccg

SEQ ID NO: 807 - DNA, 225 bp, Unknown
  Encodes 16S rRNA from Desulfotomaculum
agagtttgatcctggctcaggacgaacgctggcggcgtgcttaacacatgcaagtcgaacggagcggagcccttcggggccgagcttagtggcggacgggtgagtaacacgtgagcaacctgcccattacagggggatagcagctggaaacggctggtaataccgcataagaccgcggaaccgcatggttcagaggtaaaaggagagatccggtaatggatgggc

SEQ ID NO: 808 - DNA, 225 bp, Unknown
  Encodes 16S rRNA from Helicobacter
agagtttgatcatggctcagagttaacgctggcggcgtgcctaacacatgcaagtcgagcgagtgcttgtaaagactagcggcaaacgggtgagtaacacatgggaaaccttccttagaatgggggacatctccgtgaaaacggagctaataccgcataagaccacagtttggcatcagacaggggtaaaagcagtgatgtgttctaagatggtcctgtgtccta

SEQ ID NO: 809 - DNA, 225 bp, Unknown
  Encodes 16S rRNA from Syntrophococcus
agagtttgatcatggctcaggatgaacgctggcggcgtgcctaacacatgcaagtcgaacgggaacctcatagtggagacttcggtcaaagcagtgagaattctagtggcggatgggtgagtaacgcgtgggtaacctgcctacaagaattggataacagcgagaaattgttgctaatacaatataagcttacagtatcgcatgatacagtgagaaaagatttat

SEQ ID NO: 810 - DNA, 208 bp, Unknown
  Encodes 16S rRNA from Lachnospiracea incertae sedis
agagtttgatcctggctcaggatgaacgctagctacaggcttaacacatgcagcagtggggaatattgcacaatggaggaaactctgatgcagcgacgccgcgtgagcgatgaagtatttcggtatgtaaagctctatcagcagggaagataatgacggtacctgactaagaagctccggctaaatacgtgccagcagccgcggtaat

SEQ ID NO: 811 - DNA, 225 bp, Unknown
  Encodes 16S rRNA from Clostridium IV
agagtttgatcatggctcaggatgaacgctggcggcgtgcttaacacatgcaagtcgaacggagctatattggaaggaccttcggggacggaagatatagcttagtggcggacgggtgagtaacgcgtgagtaacctggcctcaagagggggacaacagctggaaacggctgctaataccgcataacataatggagtcgcatggctctgttatcaaaggagcaat

SEQ ID NO: 812 - DNA, 225 bp, Unknown
  Encodes 16S rRNA from Paludibacter
agagtttgatcatggctcaggatgaacgctagcgacaggcctaacacatgcaagtcgaggggcagcacgagtgaagcttgctttacttggtggcgaccggcgcacgggtgcgtaacgcgtatgcaacctgtccataaccgagggatagcctcccgaaagggagattaaaacttcatgtgccacatgagggcatccgagagtggtaaaacgtttgggttatggttg

SEQ ID NO: 813 - DNA, 225 bp, Unknown
  Encodes 16S rRNA from Lachnospiracea incertae sedis
agagtttgatcatggctcaggatgaacgctggcggcgtgcctaacacatgcaagtcgaacgggactcatagtgacggagatttcggtcaaagaagctttgagtccagtggcggacgggtgagtaacgcgtggggaacctgccctgtaccgggggataacagtgagaaatcactgctaataccgcataagcgcacatggtcgcatgaccgggtgtgaaaagctccg

SEQ ID NO: 814 - DNA, 225 bp, Unknown
  Encodes 16S rRNA from Lachnospiracea incertae sedis
agagtttgatcctggctcaggatgaacgctggcggcgcgcttaacacatgcaagtcgaacgagatgagtggcttcggtcatgaatctagtggcggacgggtgagtaacgcgtggacaacttgccttatagtgggggatagccgaaagaaatttcgattaataccgcataatacaatttggttgcatgatcagattgggaaaggcttcggtcgctaaaagaaaggt

SEQ ID NO: 815 - DNA, 225 bp, Unknown
  Encodes 16S rRNA from Adhaeribacter
agagtttgatcctggctcaggatgaacgctggcggcaggcttaatacatgcaagtcgaacggtaaggtccgaggtagcaataccgaggatacacgagtggcgcacgggtgcgtaacgcgtatgcaacctacctttgactggaacataacgttgagaaatcggcgctaatattccatgtggttatgacccggcatcgggatgtaactaaagatttattggtcaagg

SEQ ID NO: 816 - DNA, 225 bp, Unknown
  Encodes 16S rRNA from Clostridium IV
agagtttgatcatggctcaggatgaacgctggcggcgtgcataacacattcaagtcgaacggacatattgacttcggttggtatgttagtggcggacgggtgagtaacgcgtgagcaacctgcccctatgtgcgggataacggctggaaacggacgctaataccgcataacccaacggaaccgcatgattttgttggcaaagatttattgcatagggatgggctc

SEQ ID NO: 817 - DNA, 225 bp, Unknown
  Encodes 16S rRNA from Cryptanaerobacter
agagtttgatcatggctcaggacgaacgctggcggcgtgcttaatacatgcaagtcgaacggatatgtagcaatacatattagtggcggacgggtgagtaacgcgtaaccaacctgccttttacaggggaataacacttggaaacaggtgctaataccgcatatgaccacaacgcggcatcgcgaaggggtaaaagttttatcggtaaaagagggggttgcgtat

SEQ ID NO: 818 - DNA, 225 bp, Unknown
  Encodes 16S rRNA from Idiomarina
agagtttgatcggccacattgggactgagacacggcccagactcctacgggaggcagcagtggggaatattgcacaatgggggaaaccctgatgcagccatgccgcgtgtgtgaagaaggccttcgggttgtaaagcacttttgcattcgaggaagacagcgtataaataaatgcgctatttgacgttagagtgtgaataagcaccggcaaactccgtgccagca

SEQ ID NO: 819 - DNA, 225 bp, Unknown
  Encodes 16S rRNA from Clostridium IV
agagtttgatcatggctcaggacgaacgctggcggcgtgcttaacacatgcaagtcgaacgaggaatgtttgaaagcttgcttttgaacatttcgagtggcggacgggtgagtaacgcgtgaggaacctgtctttcacagggggataacgttccgaaagggacgctaataccgcatgagaccacggtgccgcatggcacaggggtcaaaggagagatccggtgaa

SEQ ID NO: 820 - DNA, 225 bp, Unknown
  Encodes 16S rRNA from Selenomonas
agagtttgatcctggctcaggacgaacgctggcggcgtgcttaacacatgcaagtcgaacgaggtgattgaaagcttgcttttgagaaccgagtggcaaacgggtgagtaacgcgtagacaacctgccgcaaagatggggacaacagtccgaaaggactgctaataccgaatgttgtcagtttctcgcatgagagactgattaaagatggcctctacttgtaagc

SEQ ID NO: 821 - DNA, 225 bp, Unknown
  Encodes 16S rRNA from Acetanaerobacterium
agagtttgatcctggctcaggataaacgctggcggcgtgcataacacattcaagtcgaacgaagcacttcggaacgagacttcggtcaagggaagatttgacttagtggcggacgggtgagtaacgcgtgagcaatctgcctcggggtgcgggataacgtttggaaacgaacgctaataccgcatgacgcatacctttcgcatgtgaggtatgccaaaggtttac

SEQ ID NO: 822 - DNA, 225 bp, Unknown
  Encodes 16S rRNA from Bifidobacterium
agagtttgatcatggctcaggatgaacgctggcggcgtgcttaacacatgcaagtcgaacgggatcggctggagcttgctccggccgtgagagtggcgaacgggtgagtaatgcgtgaccgacctgccccgtacaccggaatagctcctggaaacgggtggtaatgccggatgctccaatgcgatgcatgtcgcgttgggaaagatttcatcggtatgggatggg

SEQ ID NO: 823 - DNA, 225 bp, Unknown
  Encodes 16S rRNA from Clostridium XlVb
agagtttgatcatggctcaggatgaacgctggcggcgtgcctaacacatgcaagtcgagcgaagaatgagaagcttgcttttcattacttagcggcggacgggtgagtaacgcgtgggtaacctgccctgtacaggggaataacagttagaaatgactgctaatgccccataagccgacgtaatggcatctttatgtcggaaaagatttatcggtacaggaggga

SEQ ID NO: 824 - DNA, 225 bp, Unknown
  Encodes 16S rRNA from Asaccharobacter
agagtttgatcatggctcaggatgaacgctggcggcgtgcttaacacatgcaagtcgaacgattaaaccggcttcggccggatatagagtggcgaacgggtgagtaacacgtgaccaacctaccccatactccgggataactcagggaaacttgtgctaataccggatactccgagaggatcgcatgttcttttcgggaaagcctttacggtatgggatggggtc

SEQ ID NO: 825 - DNA, 225 bp, Unknown
  Encodes 16S rRNA from Eubacterium
agagtttgatcctggctcaggatgaacgctggcggcgtgcttaacacatgcaagtcgaacggaactcactttctgaagttttcggatggatgaaggtaagtttagtggcggacgggtgagtaacgcgtgggtaacctgccctgtacagggggataacagttagaaatgactgttaataccgcataagaccacagcaccgcatggtgcaggggtaaaagctccgac

SEQ ID NO: 826 - DNA, 225 bp, Unknown
  Encodes 16S rRNA from Anaeroplasma
agagtttgatcctggctcaggattaacgctggcggcgtgcctaatacatgcaagtcgaatggtagtagcaatacaaaccatggcgaacgggtgagtaacacgtaggtaacctgtctttaagacgaggataaccattggaaacgatggataatactggataggacatcataaagggcatccttagatgtttaaagattattatgtcacttagagaggggcctgcgg

SEQ ID NO: 827 - DNA, 225 bp, Unknown
  Encodes 16S rRNA from Saccharofermentans
agagtttgatcatggctcaggacgaacgctggcggcgtgcctaacacatgcaagtcgagcggagtaagtggagagcttgcttgaaacttacttagcggcggacgggtgagtaacgcgtgagcaacctgtcctctgcagggggataagacagcgaaagttgttctaataccgcataagaccacaacgtcacatggcgaaggggtcaaaggaggaatccggcagagg

SEQ ID NO: 828 - DNA, 225 bp, Unknown
  Encodes 16S rRNA from Ruminococcus
agagtttgatcatggctcaggacgaacgctggcggcacgcctaacacatgcaagtcgaacggtgtcggaggtgcttgcaccaatgacatagtggcggacgggtgagtaacacgtgagcaacctgccttcaagaaagggatagcttctggaaacggatggtaataccttataatatatactggccgcatgaccggtgtatcaaacgaattttgcttgaagatgggc

SEQ ID NO: 829 - DNA, 225 bp, Unknown
  Encodes 16S rRNA from Clostridium III
agagtttgatcctggctcaggacgaacgctggcggcgtgcctaacacatgcaagtcgagcggaggaaaccgaaagaagccttcgggtggattttggtggacttagcggcggacgggtgagtaacgcgtgagtaacctgcccataagagggggataatccttggaaacggggactaataccgcatatagagtatttgttgcatgattgatacttgaaagatttatc

SEQ ID NO: 830 - DNA, 225 bp, Unknown
  Encodes 16S rRNA from Acholeplasma
agagtttgatcatggctcaggattaacgctggcggcatgcctaatacatgcaagtcgaacggtctagcttgctagacagtggcgaacgggtgagtaacacgtaggtaatccacccttaggacgaggatagcttctggaaacggaaggtaaaactggatagtatatagggaggcatcttcttatatttaaaagagcaatctacctaaggaagagcctgcggcgcat

SEQ ID NO: 831 - DNA, 225 bp, Unknown
  Encodes 16S rRNA from Pedobacter
agagtttgatcctggctcaggatgaacgctagcggcaggcttaacacatgcaagtcgaggggcagcgggccgtagcaatacggtgccggcgaccggcggacgggtgcgtaacgcgtatgcaaccttccctgcacaggggtatagcccggcgaaagccggaataatcccccatagtttcaattttccgcatggagagttggataaacgggcgaccgggtgcaggat

SEQ ID NO: 832 - DNA, 225 bp, Unknown
  Encodes 16S rRNA from Sphingomonas
agagtttgatcatggctcagagcgaacgctagcggcatgctttatacatgcaagtcgaacgaacgagtttatattgagtagcaatacgatttatgaatgagttagtggcgaacgggtgagtaatatataggaatttgcccagtagtgggggacaacagttagaaatgactgctaataccgcatacgcccgagaggggaaagatttatcgctattggagaagccta

SEQ ID NO: 833 - DNA, 225 bp, Unknown
  Encodes 16S rRNA from unknown taxa
agagtttgatcctggctcagaacgaacgctggtagcgtggattaggcatgcaagtcgaacgggatccgggaggtagcaatacttcctggtgagagtggcggattggggaggaacacgtgagcaacctgccttggagtcggggaaaaccgttggaaacgacggctaataccggatgtggcgcccggtgacatcatcggagcgctaaagggggccgcaaggctctcg

SEQ ID NO: 834 - DNA, 225 bp, Unknown
  Encodes 16S rRNA from Anaerovorax
agagtttgatcatggctcaggatgaacgctggcggcgtgcctaacacatgcaagtcgagcgggaaatcctcaaaggaagcttcggcagactgagaggatggatagcggcggacgggtgagtaacgcgtaggtaagctgccccatgcacagggatagcctcgggaaactgggattaatacctgatgacaccgcgcattcacatggatatgcggtcaaagatttatc

SEQ ID NO: 835 - DNA, 225 bp, Unknown
  Encodes 16S rRNA from Spirochaeta
agagtttgatcatggctcagaacgaacgctggcggtgcgtcttaagcatgcaagtcggacggcaagatagtagcttgctactatcctagagtggcggactggtgagtaacacgtgggtgacataccctttggctggggatagccggtagaaataccgggtaataccgaataagattctgcaggttagagtggcagaaagaaaggagcttcggcttcaccgaagga

SEQ ID NO: 836 - DNA, 225 bp, Unknown
  Encodes 16S rRNA from Paraeggerthella
agagtttgatcctggctcaggatgaacgctggcggcgtgcctaacacatgcaagtcgaacggttaaggcgccttcgggcgcgaatagagtggcgaacgggtgagtaacacgtgaccaacctgccccgcgctccgggacagcctcgggaaaccgggattaataccggatgcgccggggggcgcgcatgcgccccccgggaaagcccaggcggcgcgggatggggtc

SEQ ID NO: 837 - DNA, 225 bp, Unknown
  Encodes 16S rRNA from Lachnospiracea incertae sedis
agagtttgatcctggctcaggatgaacgctggcggcgcgcctaacacatgcaagtcgaacgaaatgagtagcttcggttacaagtttagtggcggacgggtgagtaacgcgtggataatttgcctttcagtgggggatagctgagagaaatctcaattaataccgcataacataatttattcgcatgagtgagttattaaagatgcaagtcgctggaagagaagt

SEQ ID NO: 838 - DNA, 225 bp, Unknown
  Encodes 16S rRNA from Bacteroides
agagtttgatcctggctcaggatgaacgctagctacaggcttaacacatgcaagtcgaggggcagcattgaggttgcttgcaacttcagatggcgaccggcgaatgggtgagtaacgcgtatccaacctgccgtgtgctctgggatagcccttagaaatgaggattaatacgagatagtctcctttgatcgcctgagattaggagtaaagattcatcggcacacg

SEQ ID NO: 839 - DNA, 225 bp, Unknown
  Encodes 16S rRNA from Paenibacillus
agagtttgatcatggctcaggatgaacgctggcggcgtgcctaatacatgcaagtcgaacggactgtagcaatacagttagtggcgaacgggtgagtaacacgtaggtaacctgccctcaagactgggatacccagacgaaagtttggctaataccggataacaactctggaggcatctctggagtttgaaaggcgcctttaaagcgccacttaaggatggacct

SEQ ID NO: 840 - DNA, 225 bp, Unknown
  Encodes 16S rRNA from Prevotella
agagtttgatcctggctcaggatgaacgctagctacaggcttaacacatgcaagtcgaggggcagcatgaagattgcttgcaatctttgatggcgaccggcgcacgggtgcgtaacgcgtatcgaacctgccctgtacacggggatagccttgcgaaagcaagattaatacccgatgttttggcgatgccgcatgacattaccaacaaagatttatcggtacagg

SEQ ID NO: 841 - DNA, 225 bp, Unknown
  Encodes 16S rRNA from Bacteroides
agagtttgatcatggctcaggatgaacgctagctacaggcttaacacatgcaagtcgaggggcagcatgaacttagcttgctaagtttgatggcgaccggcgcacgggtgagtaacgcgtatccaaccttccgtttactcggggatagcctttcgaaagaaagattaatacccgatggtatggtaatattgcatgataataccattaaagattaattggtaaacg

SEQ ID NO: 842 - DNA, 225 bp, Unknown
  Encodes 16S rRNA from Clostridium XlVa
agagtttgatcctggctcaggatgaacgctggcggcgtgcttaacacatgcaagtcgaacgaagcatcccttgaaattttcggatggatggggatgacttagtggcggacgggtgagtaacgcgtgggtaacctgcctcatgcagggggacaacagctggaaacggctgctaataccgcataagaccccgtgagcgcatgctcaagaggtaaaagatttatcggc

SEQ ID NO: 843 - DNA, 225 bp, Unknown
  Encodes 16S rRNA from Clostridium XlVa
agagtttgatcatggctcaggatgaacgctggcggcgtgcttaatacatgcaagtcgaacgggatagattgggagcttgctcttgatttatctagtggcggacgggtgagtaacgcgtgggtaacctgcctcatacagggggataacagttagaaatgactgctaaaaccgcataacattatggtaccgcatgatatcatgatcaaatatttataggtatgagat

SEQ ID NO: 844 - DNA, 225 bp, Unknown
  Encodes 16S rRNA from Roseburia
agagtttgatcctggctcaggatgaacgctggcggcgtgcttaacacatgcaagtcgaacgaggtttaagcggaagcccttcgggacggaagcttttaccgagtggcggacgggtgagtaacgcgtgggtaacctgccctgtactgggggacaacagttggaaacgactgctaataccgcataagcgcacgagatcgcatggttttgtgtgaaaaactccggtgg

SEQ ID NO: 845 - DNA, 225 bp, Unknown
  Encodes 16S rRNA from Clostridium XlVa
agagtttgatcatggctcaggatgaacgctggcggcgtgcctaacacatgcaagtcgaacggggtacagacgctgtgagaagaagtgcttgcacggaatcaaacttgtttgtacttagtggcggacgggtgagtaacgcgtggaaaacctgcctcatacagggggataacaggaagaaattcctgctaataccgcataagcgcacaaggtcgcatgatcaggtgt

SEQ ID NO: 846 - DNA, 225 bp, Unknown
  Encodes 16S rRNA from Clostridium III
agagtttgatcatggctcaggacgaacgctggcggcgtgcctaacacatgcaagtcgaacggggaagagaagcttgcttttctttctagtggcggacgggtgagtaacgcgtgagcaacctacctatcagtgggggataacgtctggaaacagacgctaataccgcatatcgtacataattcgcatgaataagtgtatgaaaggagtaatttgctggtagatggg

SEQ ID NO: 847 - DNA, 225 bp, Unknown
  Encodes 16S rRNA from Pedobacter
agagtttgatcctggctcaggatgaacgctagcggcaggcctaatacatgcaagtcgaacggtaaacgccccttcgggggtgtgagagtggcgcacgggtgcgtaacgcgtatgcaacccacccgctgccgggggatagcccggagaaatccgaattaataccccatgaggaggaggtgaggcatctcatctttttcaaaacttcggtggcggcggacgggcatg

SEQ ID NO: 848 - DNA, 225 bp, Unknown
  Encodes 16S rRNA from Robinsoniella
agagtttgatcatggctcaggatgaacgctggcggcacgcttaacacatgcaagtcgagcggagaacagacttcggtttgttcttagcggcggacgggtgaggaacgcgtgggtaatctgccctatacaggggaataacactgagaaattagtgataaagccgcataagcccacgggatcgcatgatcctgcgggaaaaactccggtggtataggatgagcccgc

SEQ ID NO: 849 - DNA, 225 bp, Unknown
  Encodes 16S rRNA from Anaeroplasma
agagtttgatcctggctcaggattaacgctggcggcatgcctaatacatgcaagtcgaacggaactagcttgctagttcagtggcgaacgggtgagtaacacgtaggtaatctacctttaggacgaggatagcttctggaaacggaaggtaaaactggatagtatattagagggcatcctttaatatttaaaagagcaatctacctagagaggagcctgcggccc

SEQ ID NO: 850 - DNA, 225 bp, Unknown
  Encodes 16S rRNA from Clostridium XlVa
agagtttgatcctggctcaggatgaacgctggcggcgtgcctaacacatgcaagtcgaacggagtgcattaagcagattcttcggatgaagctttttacacttagtggcggacgggtgagtaacgcgtggagaacctgcctcacacagggggacagcagctggaaacggctgataataccgcatatgcccacgataccgcatggtattgcggggaaacatttatg

SEQ ID NO: 851 - DNA, 225 bp, Unknown
  Encodes 16S rRNA from Hydrogenoanaerobacterium
agagtttgatcatggctcaggacgaacgctggcggcgcgcttaacacatgcaagtcgtacgaaatcagcaatggtttagtggcggacgggtgagtataacatgaataacttgcctcagagtgggggatagcttctggaaacagaagataataccgcatatttcgaatttttctcatgaatttttcggtaaagaagctttttcgctctgagatgggttcatgcccg

SEQ ID NO: 852 - DNA, 225 bp, Unknown
  Encodes 16S rRNA from Turicibacter
agagtttgatcatggctcaggatgaacgctggcggcgtgcctaatacatgcaagtcgaacgaggttggtagcaatatcaaccgagtggcgaacgggtgagtaacacgtagggaacctgccctttagtttgggatacccagaggaaactttggctaataccggataattgttctggaggcatctccggaatctgaaaggggcctttaaagcctcgcttaaggatgg

SEQ ID NO: 853 - DNA, 225 bp, Unknown
  Encodes 16S rRNA from Papillibacter
agagtttgatcatggctcaggataaacgctggcggcgtgcttaacacattcaagtcgaacggacggaggggagcttgctcccccgagttagtggcggacgggtgagtaacgcgtgagcaacctgccttttttcgggggataacacggggaaaccggtgctaataccgcataaagtaccgacatcgcatggtgatggtaccaaaggagcaatccgaggaaagatgg

SEQ ID NO: 854 - DNA, 225 bp, Unknown
  Encodes 16S rRNA from Clostridium XlVa
agagtttgatcctggctcaggatgaacgctggcggcgtgcctaacacatgcaagtcgagcggacttatgataagattcttcggatgatttttataagttagcggcggatgggtgaggaacgcgtggagaacctgcccttcacagggggataacagctggaaacggctgttaataccgcatatgctcacggtggcgcatgtcacagggaggaaagctccggcggtg

SEQ ID NO: 855 - DNA, 225 bp, Unknown
  Encodes 16S rRNA from Saccharofermentans
agagtttgatcatggctcaggacgaacgctggcggcgtgcctaacacatgcaagtcgagcgaggacaagggcttcggttcttgttcgagcggcggacgggtgagtaacgcgtgaacaatctgtccctgacaggggaataacacttggaaacaggtgctaataccgcataagaccacgggttcgcatgaaccaggggtaaaaggagagatccggtgaggggtgagt

SEQ ID NO: 856 - DNA, 225 bp, Unknown
  Encodes 16S rRNA from Clostridium XlVb
agagtttgatcatggctcaggatgaacgctggcggcgtgcctaacacatgcaagtcgagcgaagttttagggaagcttgctttccgaagaacttagcggcggacgggtgagtaacgtgtgggtaacttgccctatgcagagggataacagtgagaaatcactgctaatacctcataagctcacaccttcacatggaggagtgagaaaagatttatcggcatagga

SEQ ID NO: 857 - DNA, 225 bp, Unknown
  Encodes 16S rRNA from Sporobacter
agagtttgatcctggctcaggatgaacgctggcggcgtgcctaacacattcaagtcgaacggagaagggagcttcggctcccggatcagtggcggacgggtgagtaacgcgtgagcaacctgccttcgtgtggggaataacacagggaaacttgtgctaataccgcataatgcaaagacatagcattgtgactttgccaaagatttattgcatgaagatgggctc

SEQ ID NO: 858 - DNA, 225 bp, Unknown
  Encodes 16S rRNA from Asaccharobacter
agagtttgatcatggctcaggatgaacgctggcggcgtgcttaacacatgcaagtcgaacgagaaagcaccttcgggtgtaagtagagtggcgaacgggtgagtaacacgtgagcaacctgcctctcactttggaataactcagagaaatttgagctaataccgaatacttcgtatctttcgcatgatcgatacgagaaagccttgtgcggtgagagatgggctc

SEQ ID NO: 859 - DNA, 225 bp, Unknown
  Encodes 16S rRNA from Bacteroides
agagtttgatcatggctcaggatgaacgctagctacaggcttaacacatgcaagtcgaggggcagcattaggtcagcttgctgatttagatggcgaccggcgcacgggtgagtaacgcgtatccaacctgccccctacccggggatagccttgcgaaagtaagattaatacccggtgctgttgcgatcccgcatggggatgcaacgaaagattcatcggtagggg

SEQ ID NO: 860 - DNA, 225 bp, Unknown
  Encodes 16S rRNA from Anaeroplasma
agagtttgatcatggctcaggattaacgctggcggcatgcctaatacatgcaagtcgaatgggaagcttgctttccatggcgaacgggtgagtaacacgtaggtaagccatacatcagacgaggataacctttggaaacgaaggataatactggataggatatttgatcgcatgattaaatatttaaagatttatcactgatggaagcacctgcggcgcattagc

SEQ ID NO: 861 - DNA, 225 bp, Unknown
  Encodes 16S rRNA from Sporobacter
agagtttgatcctggctcaggacgaacgctggcggcgtgcctaacacatgcaagtcgaacgagaattcccggaaggagacttcggtcaacggaagggaaggacagtggcggacgggtgagtaacgcgtgagcaacctgcccttcggagggggacaacagctggaaacggctgctaataccgcataacgtatcacacaggcatctgagagataccaaagatttatc

SEQ ID NO: 862 - DNA, 225 bp, Unknown
  Encodes 16S rRNA from Streptomyces
agagtttgatcctggctcaggacgaacgctggcggcgtgcttaacacatgcaagtcgaacgatgaagccgcttcggtggtggattagtggcgaacgggtgagtaacacgtgggcaatctgccctgcactctgggataagccctggaaacggggtctaataccggatgggactgctgggggcatcctctggtggtggaaagcttcggtggtgcaggatgagcccgc

SEQ ID NO: 863 - DNA, 225 bp, Unknown
  Encodes 16S rRNA from Arcobacter
agagtttgatcctggctcagagtgaacgctggcggcgtgcttaacacatgcaagtcgaacgagaacggattatagcttgctataattgtcagctaagtggcgcacgggtgagtaatgtataggtaatatgcctcttactaagggataacaattggaaacgattgctaataccttatattcctttttatcaaaagataaaaagggaaagatttattggtaagagat

SEQ ID NO: 864 - DNA, 225 bp, Unknown
  Encodes 16S rRNA from Clostridium XlVa
agagtttgatcctggctcaggatgaacgctggcggcgtgcctaacacatgcaagtcgaacggacccatggaaatgattagcttgctatgaaattccggaaggttagtggcggacgggtgagtaacgcgtgggcaacctgccctgtactgggggatagcagctggaaacggctggtaataccgcataagcgcacagtaccgcatggtacagtgtgaaaagctccga

SEQ ID NO: 865 - DNA, 225 bp, Unknown
  Encodes 16S rRNA from Barnesiella
agagtttgatcatggctcaggatgaacgctagcgacaggcctaacacatgcaagtcgaggggcagcgggagcaaagcttgctttgcttgccggcgaccggcgcacgggtgagtaacgcgtatgcaacctgcctgtaacagggggataacccggagaaatccggcctaacaccgcataacacatgtaagccgcatggttttcatgtcaaatattcgtaggttacag

SEQ ID NO: 866 - DNA, 225 bp, Unknown
  Encodes 16S rRNA from Lactobacillus
agagtttgatcatggctcaggacgaacgctggcggcgtgcctaatacatgcaagtcgagcgagcggaaccaacagatttacttcggtaatgacgttgggaaagcgagcggcggatgggtgagtaacacgtggggaacctgcccctaagtctgggataccatttggaaacaggtgctaataccggataagaaagcagatcgcatgatcagcttttaaaaggcggcg

SEQ ID NO: 867 - DNA, 225 bp, Unknown
  Encodes 16S rRNA from Flavobacterium
agagtttgatcatggctcaggatgaacgctagcggcaggcttaacacatgcaagtcgaggggtaacaggcggtagcaatactgtgctgacgaccggcgcacgggtgcgtaacgcgtatgcaacctgcccgcgacagggggataacggagggaaacttccactaatatcccatggtgccgaggtctcgcatggggtttcggctaaaggggcgacccggttgcggat

SEQ ID NO: 868 - DNA, 225 bp, Unknown
  Encodes 16S rRNA from Victivallis
agagtttgatcatggctcagaatgaacgctggcggcatggattaggcatgcaagtcgaacgccccgggcttgcccggggagtggcgaaagggtgcgcaacacgtgaggaacccgcccccgggtccgggacaagcgctggaaacggcgtctaataccggatgccgaccggaatcgcatgattccgcgtcgaaagtcttctcgcccggggaaggcctcgcgtcccat

SEQ ID NO: 869 - DNA, 225 bp, Unknown
  Encodes 16S rRNA from Clostridium XlVa
agagtttgatcctggctcaggatgaacgctggcggcgtgcctaacacatgcaagtcgaacgatgaaatacggagacgagttttcggacgagaggaagtatggaatagtggcggacgggtgagtaacgcgtggataatctgccccatacagggggatagcagttggaaacgactgataacaccgcataagcgcacggagaggcatctctttgtgtgaaaatctacg

SEQ ID NO: 870 - DNA, 225 bp, Unknown
  Encodes 16S rRNA from Ureaplasma
agagtttgatcctggctcaggattaacgctggcaccatgcctaatacatgcatgtcgagcggagtttagagagcttgctttctaaacttagcggcaaatgggtgagtaacacgtaaggaacctgcctaagcgacgaggacaacggttggaaacgactgctaatactggatagtataagaaaccgcatgatttcttatttaaaggtccgtttggaccacgcttaga

SEQ ID NO: 871 - DNA, 225 bp, Unknown
  Encodes 16S rRNA from Acetanaerobacterium
agagtttgatcatggctcaggatgaacgctggcggcgcgcctaacacatgcaagtcgaacggacgaagctcttcggagccaagttagtggcgaacgggtgagtaacacgtgaggaacctgcctttcagagggggataacacttagaaataggtgctaataccgcataagaccacagagcggcatcgctcaggggtcaaaggagcaatccgctgaaagatggcctc

SEQ ID NO: 872 - DNA, 225 bp, Unknown
  Encodes 16S rRNA from Slackia
agagtttgatcatggctcaggatgaacgctggcggcgtgcctaacacatgcaagtcgaacgattaaagcccctccgggggtgcatagagtggcgaacgggtgagtaacacgtgaccaacccgccccggacaccgggacaacgggcggaaacgcctgctaataccggatactccgcgacggacgcatgtccgacgcgggaaagcccaggcggtccgggatggggtc

SEQ ID NO: 873 - DNA, 225 bp, Unknown
  Encodes 16S rRNA from Lachnospiracea incertae sedis
agagtttgatcctggctcaggatgaacgctggcggcgtgcctaacacatgcaagtcgagcggagataagcaccggatgaagatttatcggattccaccgcttatcttagcggcggatgggtgagtaacgcgtggataacctgccccttgcagggggataacaaccggaaacgggtgctaataccgcataggcgcgtaggaccgcatggtcctaagcgtaaagatt

SEQ ID NO: 874 - DNA, 225 bp, Unknown
  Encodes 16S rRNA from Oscillibacter
agagtttgatcctggctcaggacaaacgctggcggcgtgcctaacacatgcaagtcgaacggagcttatcaccttcgggaggtaagcttagtggcggactggtgagtaacgcgtgagcaacctgcccttcagtgggggacaacagctggaaacggctgctaataccgcatgacgttagatgaaggcatcttcgtttaactaaagatttattgctgaaggatgggc

SEQ ID NO: 875 - DNA, 225 bp, Unknown
  Encodes 16S rRNA from Prevotella
agagtttgatcatggctcaggatgaacgctagcgacaggcctaacacatgcaagtcgaggggcagcatggtcttagcttgctaagactgatggcgaccggcgcacgggtgagtaacgcgtatgcaacctttccgcgtccccgggacagtcggccgaaaggccgcgtaacaccgggcgttccgtttgaggggcatcccttgggcggaatacgcgagggtcgcgggt

SEQ ID NO: 876 - DNA, 225 bp, Unknown
  Encodes 16S rRNA from Proteiniphilum
agagtttgatcatggctcaggatgaacgctagcggcaggcctaacacatgcaagtcgaggggcagcgggaggtagcaataccttgccggcgaccggcgcacgggtgcgtaacgcgtatgcaacctaccttcaacagggggataacccagagaaatccggactaataccccgtatagtagcgagaccgcatgatcttgctacgaaagcttcggtggttggagatgg

SEQ ID NO: 877 - DNA, 225 bp, Unknown
  Encodes 16S rRNA from Spirochaeta
agagtttgatcatggctcagaacgaacgctggcggcgcgtcttaagcatgcaagtcgagcgggaaacagtagcttgctactgttgagagcggcggactggtgagtaacgcgtgggtgacgtaccctctggatggggatagctcctagaaataggaggtaataccgaatacgatgcacgggaacagaggccgtgcatgaaagtatcttttgatacgccggaggagc

SEQ ID NO: 878 - DNA, 225 bp, Unknown
  Encodes 16S rRNA from Ruminococcus
agagtttgatcatggctcaggacgaacgctggcggcacgcctaacacatgcaagtcgaacggtgaatgaatagcttgctagacattcatagtggcggacgggtgagtaacacgtgagcaacctgcctctgagagagggatagcttctggaaacggatggtaatacctcatgatatagcgttctcgcatgggaatgctatcaaacgaaattcgctcagagatgggc

SEQ ID NO: 879 - DNA, 225 bp, Unknown
  Encodes 16S rRNA from Prevotella
agagtttgatcctggctcaggatgaacgctagctacaggcttaacacatgcaagtcgaggggcatcgggagggaagcttgctttccttgccggcgaccggcgcacgggtgagtaacgcgtatccaacctgccgcacagtaggggatagcccggagaaatccggattaataccctatgttctccgagtcagtcatctgaattggagcaaaggttcgccgctgtgcg

SEQ ID NO: 880 - DNA, 225 bp, Unknown
  Encodes 16S rRNA from Butyricicoccus
agagtttgatcctggctcaggataaacgctggcggcgcacataagacatgcaagtcgaacgggaactttattgaagtttactgatataaagttctagtggcggactggtgagtaatgtataagcaacctgcctataagaggggaataacagtgagaaatcattgctaataccgcataagctgtgagaatggcatcattcaaacagaaaaggaagcaattccgctt

SEQ ID NO: 881 - DNA, 225 bp, Unknown
  Encodes 16S rRNA from Devosia
agagtttgatcatggctcagaacgaacgctggcggcaggcttaacacatgcaagtcaagggggtgtagcaatacacaaccggcgcacgggtgagtaacgcgtgggaatatgtccatttgtggggaatagcttctggaaacggaaggtaataccgcatacgccctacgggggaaagatttatcgcagatggagtggcccgcgttggattagctagttggttgggta

SEQ ID NO: 882 - DNA, 225 bp, Unknown
  Encodes 16S rRNA from Anaeroplasma
agagtttgatcatggctcaggattaacgctggcggcgtgcctaatacatgcaagtcggatggttagcttgctaaccatggcgaacgggtgagtaacacgtaggtaacctgtcttaaagacgaggataaccattggaaacgatggataatactggataggatatataagggcatcctgatatatttaaagatttatcactttatgaggggcctgcggcgcattagt

SEQ ID NO: 883 - DNA, 225 bp, Unknown
  Encodes 16S rRNA from Oscillibacter
agagtttgatcatggctcaggacgaacgctggcggcgtgcctaacacatgcaagtcgaacgaagctccgaaagcaacggtttcggccggagtggacggatgacttagtggcggacgggtgagtaacgcgtgagcaacctgcccttcagagggggacaacagttggaaacgactgctaataccgcataacgtaaggaaatggcatcatattcttaccaaagattta

SEQ ID NO: 884 - DNA, 225 bp, Unknown
  Encodes 16S rRNA from Barnesiella
agagtttgatcatggctcaggatgaacgctagcgacaggcctaacacatgcaagtcgagggtgaagtttgaagtagcttgctacggataatggaaaccggcgcacgggtgcgtaacaggtatgcaatctatcctaagccgggggatagcccactgaaaagtggattaatactccatgtgccacgagggggcatccttttgtggtgaaacgtgagggcataggttg

SEQ ID NO: 885 - DNA, 225 bp, Unknown
  Encodes 16S rRNA from Atopobium
agagtttgatcatggctcaggatgaacgctggcggcgcgcttaacacatgcaagtcgaacggttaaagcccttcggggtgaataaagtggcgaacggctgagtaacacgtgggcaacctacccctcacattgggatagcctcgggaaaccgggagtaataccgaatactccggacatctcgcatgggatgaccgggaaagctccggcggtgagggatgggcccgc

SEQ ID NO: 886 - DNA, 225 bp, Unknown
  Encodes 16S rRNA from Clostridium XlVa
agagtttgatcatggctcaggatgaacgctggcggcgcgcataacacatgcaagtcgaacggagtcacattgaaacctagtgatttgtgacttagtggcggacgggtgagtaacgcgtgggtaacctgcctggtattgggggacaacagttagaaatgactgctaataccgcatacgacgtcggggaggcatctccctgacgggaaaggaattatccgatatcag

SEQ ID NO: 887 - DNA, 225 bp, Unknown
  Encodes 16S rRNA from Methanobrevibacter
agagtttgatcctggcagatgctactgctattgggattcgattaagccatgcaagtcgaacgagtttaggctcgtggcgtacggctcagtaacacgtggataacctacccttaggactgggataaccctgggaaactggggataataccggataggcaatttttcctgtaatggttttttgtttaaatgttttttcgcctaaggatgggtctgcggccgattagg

SEQ ID NO: 888 - DNA, 225 bp, Unknown
  Encodes 16S rRNA from Butyricimonas
agagtttgatcatggctcaggatgaacgctagcggcaggcttaacacatgcaagtcgaggggcagcgcgtcgtagcaatacgatggcggcgaccggcggaagggtgcgtaacgcgtgagcaacttgcccgtcactgtgggataggcactggaaacggtgtgtaataccacgtaacactacgagctgcatggtttgtagttgaaagattcattggtgacggatagg

SEQ ID NO: 889 - DNA, 225 bp, Unknown
  Encodes 16S rRNA from Butyricimonas
agagtttgatcctggctcaggatgaacgctagcggcaggcttaacacatgcaagtcgaggggcagcgcgttgtagcaatacgatggcggcgaccggcgcaagggtgcgtaacgcgtgagcaacatgcccgcaacagggggataaccggaggaaactccgactaataccccataaggacgtaggacggcatcgtccagcatctaaacttacgagggttgcggattg

SEQ ID NO: 890 - DNA, 225 bp, Unknown
  Encodes 16S rRNA from Asaccharobacter
agagtttgatcatggctcaggatgaacgctggcggcgtgcctaacacatgcaagtcgaacggttaaaccggcttcggccggatatagagtggcgaacgggtgagtaacacgtgaccaacctgccccccgctccgggataacccagggaaacctgcgctaataccggatactccgcccgggccgcatggcccgggcgggaaagcccagacggcgggggatggggtc

SEQ ID NO: 891 - DNA, 225 bp, Unknown
  Encodes 16S rRNA from Enhydrobacter
agagtttgatcatggctcagattgaacgctggcggcaggcttaacacatgcaagtcgaacgatgaaactctagcttgctagagatgattagtggcggacgggtgagtaacatttaggaatctgcctagtagtgggggatagctcggggaaactcgaattaataccgcatacgacctacgggtgaaagggggcgcaagctcttgctattagatgagcctaaatcag

SEQ ID NO: 892 - DNA, 225 bp, Unknown
  Encodes 16S rRNA from Treponema
agagtttgatcatggctcagaatgaacgctggcggcgggtcttaagcatgcaagtcggacggcaagaaagtgcttgcactttcctagagtggcggactggtgaggaacacgttggtgacgtaccctttggatggggatagccggtagaaataccgggtaataccgaataaggtcggtggtcttggaagccaccgaggaaagcggctttggccgcgccgaaggaac

SEQ ID NO: 893 - DNA, 225 bp, Unknown
  Encodes 16S rRNA from Clostridium XlVa
agagtttgatcatggctcaggatgaacgctggcggcgtgcttaacacatgcaagtcgaacgaagcatgagtgatgagtaatctgatctcatgacttagtggcggacgggtgagtaacgcgtgggtaacctacctcacacagggggataacagttggaaacgactgctaaaaccgcataacatggcgataccgcatgacattgccatcaaatatttataggtgtga

SEQ ID NO: 894 - DNA, 225 bp, Unknown
  Encodes 16S rRNA from Adlercreutzia
agagtttgatcctggctcaggatgaacgctggcggcgtgcttaacacatgcaagtcgaacgattaacccatcttcggatggttataaagtggcgaacgggtgagtaacacgtgaccaacctgcctttcacattgggataactaagggaaactgtagctaataccaaatactccggcacctccgcatggtagtgccgggaaagctccggcggtgaaagatggggtc

SEQ ID NO: 895 - DNA, 225 bp, Unknown
  Encodes 16S rRNA from Prevotella
agagtttgatcctggctcaggatgaacgctagctacaggcttaacacatgcaagtcgcggggcagcgggagagaagcttgcttttcttgccggcgaccggcgcacgggtgcgtaacgcgtatcgaacctgccccagtcagggggacagccctctgaaaggaggattaataccccatggttccctgtgtccgcatggacgttgggataaaggagagattcggactg

SEQ ID NO: 896 - DNA, 225 bp, Unknown
  Encodes 16S rRNA from Pseudoflavonifractor
agagtttgatcatggctcaggatgaacgctggcggcgcgcctaacacatgcaagtcgaacggtgaagtcccttcgggggctgatcagtggcggacgggtgagtaacgcgtgaggaacctgcccttatgagcggaataacgtcgggaaactgacgctaataccgcataatgcatcaccggggcatcgcggtgatgccaaagcttcggcgcataaggatggactcgc

SEQ ID NO: 897 - DNA, 225 bp, Unknown
  Encodes 16S rRNA from Syntrophococcus
agagtttgatcatggctcaggatgaacgctggcggcgtgcttaacacatgcaagtcgaacgagaaccttacgacggagacttcggttgaagatgtaagaattctagtggcggacgggtgagtaacgcgtgggtaacctgcccatgagaggaggataacagggagaaattcttgctaatactctatatgcttacggtatcgcatgatactgtgaggaaatgaattt

SEQ ID NO: 898 - DNA, 225 bp, Unknown
  Encodes 16S rRNA from Clostridium IV
agagtttgatcatggctcaggatgaacgctggcggcgtgcctaacacatgcaagtcgaacgaagctcctgatttgatcccctcggggtaatttgacggatgacttagtggcggacgggtgagtaacgcgtgagcaacctgcctttcagagggggataacggttggaaacgaccgctaataccgcataacacagaggaaccgcatgattcttttgtcaaagctgag

SEQ ID NO: 899 - DNA, 225 bp, Unknown
  Encodes 16S rRNA from Demequina
agagtttgatcatggctcaggacgaacgctggcggcgtgcttaacacatgcaagtcgaacggtgaacctggagcttgctccgggggatcagtggcgaacgggtgagtaacacgtgagtaacctgccccagacactgggataacctcgggaaaccggggctaataccggatacgagacgctcgggcatccgaagcgtctggaaagatttatcggtctgggatggac

SEQ ID NO: 900 - DNA, 225 bp, Unknown
  Encodes 16S rRNA from Lachnospiracea incertae sedis
agagtttgatcctggctcaggatgaacgctggcggcgtgcttaacacatgcaagtcgaacggaacatttcgcccgatgattgaagtagcttgctacggattgaatcaactgaaatgtttagtggcggacgggtgagtaacgcgtgggtaacctaccttacacagggggataacagttagaaatgactgctaataccgcataagcgcacagtaccgcatggtacgg

SEQ ID NO: 901 - DNA, 225 bp, Unknown
  Encodes 16S rRNA from Saccharofermentans
agagtttgatcatggctcaggatgaacgctggcggtatgcttaacacatgcaagtcgaacggtagcagcaatgctatagtggcggacgggtgagtaacgcgtgaacaatctgcctgtatcaggggaataacagttcgaaaggactgctaataccgcatatgatcatagaggggcatccctcagtgatgaaagatttatcggatacagatgagttcgcgtcctatt

SEQ ID NO: 902 - DNA, 225 bp, Unknown
  Encodes 16S rRNA from Sphaerisporangium
agagtttgatcatggctcaggacgaacgctggcggcgtgcttaacacatgcaagtcgagcggaaaggcccttcggggtactcgagcggcgaacgggtgagtaacacgtgagcaacctgtccttgactctgggataagcctgggaaaccgggtctaataccggataggacctgtctccgcatgggggtgggtggaaagttttttcggtcaggggtgggctcgcggc

SEQ ID NO: 903 - DNA, 225 bp, Unknown
  Encodes 16S rRNA from Anaeroplasma
agagtttgatcatggctcaggattaacgctggcggcgtgcctaatacatgcaagtcgaatggttagcttgctaaccatggcgaacgggtgagtaacacgtaggcaacctgtctaagagacgaggataaccattggaaacgatggataatactggataagatattgggaggcatcttctgatatttaaagatttatcgctaatagaggggcctgcggcgcattagc

SEQ ID NO: 904 - DNA, 225 bp, Unknown
  Encodes 16S rRNA from Geobacillus
agagtttgatcctggctcagaatgaacgctggcggcatggattaggcatgcaagtcggacggggtgcagcgatgcacccagtggcgaaagggtgcgcaacgcgtggggaacctgcccccggatccgggacaagcgctggaaacggcgtctgatacgggatgcggaggggggccgcatggcccccgctccaaagattcatcgtccggggagggccccgcgtcccat

SEQ ID NO: 905 - DNA, 225 bp, Unknown
  Encodes 16S rRNA from Prevotella
agagtttgatcatggctcaggatgaacgctagctacaggcctaacacatgcaagtcgaggggcagcatgggagaagcttgcttttcccgatggcgaccggcgaatgggtgagtcacgcgtgtccaacctgccttcagcccggggatagcccttggaaatgaggattaagacccgatagatggaagttccgcatggcgcttccatgaaactggactgaagatgggg

SEQ ID NO: 906 - DNA, 225 bp, Unknown
  Encodes 16S rRNA from Clostridium XlVa
agagtttgatcctggctcaggatgaacgctggcggcgtgcctaacacatgcaagtcgaacgatgaagcggggaggaagttttcggatggaattcctgtggaagagtggcggacgggtgagtaacgcgtggataacctgccccgtacagggggatagcagcgggaaactgctggtaataccgtatatgcgcacaactgccgcatggcagggtgtggaaagttacgg

SEQ ID NO: 907 - DNA, 225 bp, Unknown
  Encodes 16S rRNA from Victivallis
agagtttgatcatggctcagaacgaacgctggcggcatggattaggcatgcaagtcgaacgaagcagcaatgcttagtggcgcaagggtgaggaacacgtgagtgacctacccgcaagtttggaacagctcctggaaacgggaattaataccggatgtgatcgataggccgcatggtttattgattaaagcagcaatgcgcttgcggatgggctcgcgtcccatt

SEQ ID NO: 908 - DNA, 225 bp, Unknown
  Encodes 16S rRNA from Bacteroides
agagtttgatcatggctcaggatgaacgctagctacaggcttaacacatgcaagtcgaggggcatcaggtatctagcttgctaggtatgctggcgaccggcgcacgggtgcgtaacacgtatccaacctgcccgcagctcagggacagcctttcgaaagaaagattaatacctgacggtctctaccggggacatccccggcagagtaaagattcatcggcggcgg

SEQ ID NO: 909 - DNA, 225 bp, Unknown
  Encodes 16S rRNA from Demequina
agagtttgatcctggctcaggacgaacgctggcggcgtgcttaacacatgcaagtcgaacggtgaactcggagcttgctccgggggatcagtggcgaacgggtgagtaacacgtgagtaacctgccccagactctgggataacctcgggaaaccggggctaataccggatacgagacgttcgggcatccgaagcgtctggaaagatttatcggtctgggatggac

SEQ ID NO: 910 - DNA, 225 bp, Unknown
  Encodes 16S rRNA from Paraeggerthella
agagtttgatcatggctcaggatgaacgctggcggcgtgcctaacacatgcaagtcgaacggttaagccggcttcggccgggaatacagtggcgaacgggtgagtaacacgtgaccaacctgccccccgccccgggatagccccccgaaagggggattaataccgggtactccgcaagggccgcatggcccctgcgggaaagctccggcggcgggggatggggtc

SEQ ID NO: 911 - DNA, 225 bp, Unknown
  Encodes 16S rRNA from Paraprevotella
agagtttgatcatggctcaggatgaacgctagcggcaggcttaacacatgcaagtcgaggggcagcgagagagtagcaatacttttgtcggcgaccggcgcacgggtgagtaacgcgtatgcaacctttcccagacagggggatagcccagggaaacttggattaataccccgtaggccgagggatggcatcgtccttcggttaaagttccggcggtctggggtg

SEQ ID NO: 912 - DNA, 225 bp, Unknown
  Encodes 16S rRNA from Pseudoflavonifractor
agagtttgatcatggctcaggacgaacgctggcggcgtgcttaacacatgcaagtcgaacgagggtattagtcagcttgctgattgatactcgagtggcggacgggtgagtaacgcgtgaggaacctgtcttcatcagggggataacgtcccgaaagggatgctaataccgcatgagaccacgataccgcatggtattgaggtcaaaggagcgatccggatgaag

SEQ ID NO: 913 - DNA, 225 bp, Unknown
  Encodes 16S rRNA from Roseburia
agagtttgatcctggctcaggatgaacgctggcggcgtgcttaacacatgcaagtcgaacggacttctccggaaataagcttcggcagaaagaaggaggagttagtggcggacgggtgagtaacgcgtgggcaacctgccttacattgggggataacagttagaaatgactgctaataccgcataagaccacgaggccgcatggccacggggtaaaagttccggc

SEQ ID NO: 914 - DNA, 225 bp, Unknown
  Encodes 16S rRNA from Gelidibacter
agagtttgatcatggctcaggataaacgctagcggcaggcctaacacatgcaagtcgagcggcagcgggagtggcaacacttgccggcgagcggcggacgggtgagtaacgcgtatgcaacctgcccaccacacggagatagccgaccgaaaggacgattaaactccgatggcacctcatcaaggcatcttcttgaggttaaatattcataggtggtggatgggc

SEQ ID NO: 915 - DNA, 225 bp, Unknown
  Encodes 16S rRNA from Clostridium IV
agagtttgatcctggctcaggacgaacgctggcggcgtgcctaacacatgcaagtcgaacggaactttaccggatgaagttttcggatggaatcagataaagtttagtggcggacgggtgagtaacgcgtgagtaacctgcccttcagagggggacaacgtcttgaaaaggacgctaataccgcataacatatattcatcgcatggtggatatatcaaaggagca

SEQ ID NO: 916 - DNA, 225 bp, Unknown
  Encodes 16S rRNA from Rhizobium
agagtttgatcatggctcagaacgaacgctggcggtatgcttaacacatgcaagtcgcacgagaaagttcttcggaatgagtaaagtggcgtacgggtgagtaatgtataggaatctacccagtaatgaggaataagcactggaaacggtgtctaataccacatactaccgatttatcgggaaaggtttaatcttcgggttaaactgttattggatgagcctata

SEQ ID NO: 917 - DNA, 225 bp, Unknown
  Encodes 16S rRNA from Acholeplasma
agagtttgatcatggctcaggatgaacgctggcggcgtgcctaatacatgcaagtcgaacggataccttcgggtattagtggcgaacgggtgagtaacacgtaggtaatctaccttaaagacggggataacagatggaaacgactgttaataccggatagtatatgaagtcgcatgattttatatttaaagttcccacgggaacactttaagatgagcctgcggc

SEQ ID NO: 918 - DNA, 225 bp, Unknown
  Encodes 16S rRNA from Clostridium XlVa
agagtttgatcctggctcaggatgaacgctggcggcgtgcctaacacatgcaagtcgaacggagatgcatcagcgagaggattcgtccgatcaagatgtatcttagtggcggacgggtgagtaacgcgtggataacctgcctccatccgggggatagcagttggaaacgactggtaataccgcatgagcgcacggtaaggcatcttacagtgtgaaaagattaat

SEQ ID NO: 919 - DNA, 225 bp, Unknown
  Encodes 16S rRNA from Bacteroides
agagtttgatcatggctcaggatgaacgctagcggcaggcttaacacatgcaagtcgaggggcagcgagagagtagcaatacttttgtcggcgaccggcgcacgggtgagtaacgcgtatgcaacctttcccagacagggggatagcccagggaaacttggattaataccccgtaggccgagtggcggcatcgccgttcggttaaagttccggcggtctggggtg

SEQ ID NO: 920 - DNA, 225 bp, Unknown
  Encodes 16S rRNA from Bacteroides
agagtttgatcctggctcaggatgaacgctagcggcaggcttaacacatgcaagtcgaggggcagcgtgggggtagcaatacttccgacggcgaccggcgcacgggtgagtaacgcgtatgcaacctttcccagacagggggatagcccagggaaacttggattaataccccgtaggccacaggcgggcatccgccagtggttaaagttccggcggtctggggtg

SEQ ID NO: 921 - DNA, 225 bp, Unknown
  Encodes 16S rRNA from Papillibacter
agagtttgatcatggctcaggatgaacgctggcggcgtgcataacacattcaagtcgaacgaagcactttggacggatcccttcggggtgaagactgatttgacttagtggcggacgggtgagtaacgcgtgagcaacctgccttgaagagggggataacacagggaaacttgtgctaataccgcataacgtacgtggatcgcatggtccgtgtaccaaagcctt

SEQ ID NO: 922 - DNA, 225 bp, Unknown
  Encodes 16S rRNA from Fusibacter
agagtttgatcctggctcaggattaacgctggcggcgtgcctaacacatgcaagtcgagcgggaaatttgagagcgaagcttcggcagagctcttaaatggagagcggcggacgggtgagtaacgcgtaggtaacctgccctgcacagagggatagccactggaaacggtgattaatacctcataaaactgttttgccgcatgacagaacagccaaagatttatc

SEQ ID NO: 923 - DNA, 225 bp, Unknown
  Encodes 16S rRNA from Coraliomargarita
agagtttgatcctggctcagagtgaacgctggcggcgtggctaagacatgcaagtcgagcgagaaggtgccttcgggtaccggaaagcggcaaacgggtgcgtaacacgtaagtaacctgcccttaagacgggaacagcttgatgaaaattaagataatgcccgatatccgcttctttcgcatgagagaagtcggaaaggtttgtgatgacgcttaaggaggggc

SEQ ID NO: 924 - DNA, 225 bp, Unknown
  Encodes 16S rRNA from Papillibacter
agagtttgatcatggctcaggattaacgctggcggcgtgcataacacattcaagtcgaacggagtgtagaaatacacttagtggcggacgggtgagtaacgcgtgagcaatctaccttccagtgcgggataacaaccggaaacagttgctaataccgcatgaaccggcagcatcgcatggtgcaaccggcaaaggcttgctgctggaagatgagcttgcgtccga

SEQ ID NO: 925 - DNA, 225 bp, Unknown
  Encodes 16S rRNA from Clostridium XlVa
agagtttgatcatggctcaggatgaacgctggcggcgtgcctaacacatgcaagtcgaacggagctgcgacgctgatgattggagtacttgtacgaagagaatcttgtcgtagcttagtggcggacgggtgagtaacgtgtggataacctggtccaatctgggggatagcagctggaaacggctggtaataccgcataagcgcacggtgtggcatcacacagtgt

SEQ ID NO: 926 - DNA, 225 bp, Unknown
  Encodes 16S rRNA from Acholeplasma
agagtttgatcatggctcaggatgaacgctggcggcgtgcctaatacatgcaagtcgaacgagctgcttcggcagcgagtggcgaacgggtgagtaacatatgaataatctacctctttaactgggataccagtctgaaaagactgctaataccggataggtaatactgaggcatctcggtattattaaagatgcgtttgcatcgaattgagatgagttcatatc

SEQ ID NO: 927 - DNA, 225 bp, Unknown
  Encodes 16S rRNA from Catenibacterium
agagtttgatcggccacattggaactgagacacggtccaaactcctacgggaggcagcagtaaggagttttcggcaatgggggaaaccctgaccgagcaacgccgcgtgagcgatgacggtcctttggattgtaaagctctgttgtaagccatgaaagatagctttaggaaatgaaagttatttgacgacagcttaccagaaagccacggctaactacgtgccag

SEQ ID NO: 928 - DNA, 225 bp, Unknown
  Encodes 16S rRNA from Clostridium IV
agagtttgatcatggctcaggatgaacgctggcggcgtgcttaacacatgcaagtcgaacgaggttagcggcttcggccgataaccgagtggcggacgggtgagtaacgcgtgaacaatctgtcctgcaaagggggataacaactggaaacagttgctaataccgcataagaccacgaagtcgcatggctttgaggtaaaagcagcgatgcgatgcagggtgagt

SEQ ID NO: 929 - DNA, 225 bp, Unknown
  Encodes 16S rRNA from Clostridium IV
agagtttgatcatggctcaggatgaacgctggcggcgtgcttaacacattcaagtcgaacggacgaggggagcttgctccccaagttagtggcggacgggtgagtaacgcgtgagcaacctgcctttctaagcgggataacagagggaaaccgctgctaataccgcataacgtatgatgaacgcatgttcgacataccaaaggagcgatccgaagaaagatgggc

SEQ ID NO: 930 - DNA, 225 bp, Unknown
  Encodes 16S rRNA from Clostridium IV
agagtttgatcatggctcaggacgaacgctggcggtatgcctaacacatgcaagtcgaacgggtgtgtagagagcttgctctttatttcactagtggcggacgggtgagtaacgcgtgagtaatctgccttgaagtgggggataacatttggaaacaagtgctaataccgcgtaatatacgttcttcgcatgaagtttgtatcatagtttttcgcttcaagatga

SEQ ID NO: 931 - DNA, 225 bp, Unknown
  Encodes 16S rRNA from Nitrobacter
agagtttgatcatggctcagagcgaacgctagcggaatgctttatacatgcaagtcgaacgaaaaaccatacggagtagcaatacaaagtggaagtttttagtggcgaacgggtgagtaatagataggaacttgccgagtagtgggggacaacagatagaaatgtctgctaataccgcatacgcccgagaggggaaagatttatcgctatttgagaggcctattc

SEQ ID NO: 932 - DNA, 225 bp, Unknown
  Encodes 16S rRNA from Victivallis
agagtttgatcatggctcagaacgaacgctggcggcatggattaggcatgcaagtcgaacgaagcagcaatgcttagtggcgcaagggtgaggaacacgtgagtgacctgcccgcaagtttggaacagctcctggaaacgggaattaataccggatgtgatcatagagctgcatggttttatgattaaagcagcaatgcgcttgcggatgggctcgcgtcccatt

SEQ ID NO: 933 - DNA, 225 bp, Unknown
  Encodes 16S rRNA from Selenomonas
agagtttgatcctggctcaggacgaacgctggcggcgtgcttaacacatgcaagtcgaacgagacgattgaaagcttgcttttgaaagtcgagtggcaaacgggtgagtaacgcgtagacaacctgcctttgagatggggacaacagtccgaaaggactgctaataccgaatgttgtggattttccgcatgggagatccaccaaagatgacctcttcctgaaagt

SEQ ID NO: 934 - DNA, 225 bp, Unknown
  Encodes 16S rRNA from Enterorhabdus
agagtttgatcatggctcaggatgaacgctggcggcgtgcctaacacatgcaagtcgaacggttaaagcgccttcgggcgtgcatagagtggcgaacgggtgagtagcacgtgaccaacctgccccgcgcaccgggacagcctcgcgaaagcgggattaataccggatactccggccgcaccgcatggtgcggccgggaaagctccggcggcgcgggatggggtc

SEQ ID NO: 935 - DNA, 225 bp, Unknown
  Encodes 16S rRNA from Eubacterium
agagtttgatcatggctcaggacgaacgctggcggtatgcttaacacatgcaagtcgaacgagaagcgggtattggaggtttcggccgaagagacctgcagaaagtggcgaacgggtgagtaacgcgtgggcaacctgcctcatggaaagggatagcctcgggaaactgggagtaaaaccttataacatatgcttatcgcatggtaggcatatcaaaactccggt

SEQ ID NO: 936 - DNA, 225 bp, Unknown
  Encodes 16S rRNA from Roseburia
agagtttgatcctggctcaggatgaacgctggcggcgtgcttaacacatgcaagtcgaacgaagcattttgatctgatcatttcggtgtgaagaacttaatgacttagtggcggacgggtgagtaacgcgtgggtaacctacctcatacagggggatagcagttggaaacgactgataataccgcataagcgcacaggaccgcatggtccagtgtgaaaagcctt

SEQ ID NO: 937 - DNA, 225 bp, Unknown
  Encodes 16S rRNA from Prevotella
agagtttgatcatggctcaggatgaacgctagctacaggcttaacacatgcaagtcgaggggcagcatggggactgcttgcagttcccgatggcgaccggcgcacgggtgagtaacgcgtatccaacctgcccgcaaccgcggaatagcccgccgaaaggcggattaatgccgcatgagctcgcgagagggcatctggccgcgagcaaaggtatttccggttgcg

SEQ ID NO: 938 - DNA, 225 bp, Unknown
  Encodes 16S rRNA from Asaccharobacter
agagtttgatcctggctcaggatgaacgctggcggcgtgcttaacacatgcaagtcgaacgagaaagcaccctcgggtgcgagtagagtggcgaacgggtgagtaacacgtgagcaacctgccccccgcaccgggataaccgggcgaaagcccggctaataccggatgcgccccggcgcgcgcatgcgcggcgggggaaagccctggcggcgggggatgggctcg

SEQ ID NO: 939 - DNA, 225 bp, Unknown
  Encodes 16S rRNA from Bacteroides
agagtttgatcatggctcaggatgaacgctagctacaggcttaacacatgcaagtcgaggggcagcatggtgtgtgcttgcacacactgatggcgaccggcgcacgggtgagtaacgcgtatccaacctgcccggtactcgggaacagccctctgaaaggaggattaatgcccgatgttccgtgcatcccgcctgggatgcccggcaaagattcatcggtaccgg

SEQ ID NO: 940 - DNA, 225 bp, Unknown
  Encodes 16S rRNA from Clostridium XlVa
agagtttgatcctggctcaggatgaacgctggcggcgtgcctaacacatgcaagtcgaacgaggtattgcaatcgagatggaggagcttgctccgaagtctcactcgtgataccgagtggcggacgggtgagtaacgcgtggagaacctgccccgtacagggggataccaattagaaatgattgttaataccgcataagcgcacatgaccgcatggtcgagtgtg

SEQ ID NO: 941 - DNA, 225 bp, Unknown
  Encodes 16S rRNA from Gelidibacter
agagtttgatcctggctcaggataaacgctagcggcaggcctaacacatgcaagtcgagcggcagcgggagtagcaatacttgccggcgagcggcggacgggtgagtaacgcgtatgcaacctgcccaccacacggagatagccgaccgaaaggacgattaaactccgatggcacctcatcaaggcatctttttgaggttaaatatttataggtggtggatgggc

SEQ ID NO: 942 - DNA, 225 bp, Unknown
  Encodes 16S rRNA from Brevundimonas
agagtttgatcatggctcaggacgaacgctggcggtgtgcctcatacatgcaagtcgaacgataaggttccttcgggaatacataagtggcggacgggtgagtacaacataggaaatctgccctaaactgggggacaacagagggaaactcctgctaataccccatatgagcttagttgaaatactaatcttgaaagctccggcggtttaggatgagcctgtgcc

SEQ ID NO: 943 - DNA, 225 bp, Unknown
  Encodes 16S rRNA from Clostridium XlVa
agagtttgatcctggctcaggatgaacgctggcggcgtgcctaacacatgcaagtcgaacgaagcgcccggaacagaggattcgtccgaagggaagggatgactgagtggcggacgggtgagtaacgcgtggaaaacctgccccatgcagggggacaacagggagaaatccctgctaataccgcataagcgcacggcacggcatcgtgcagtgtgaaaagattta

SEQ ID NO: 944 - DNA, 225 bp, Unknown
  Encodes 16S rRNA from Prevotella
agagtttgatcctggctcaggatgaacgctagctacaggcttaacacatgcaagtcggggggcagcacgggaagcagcaatgcttttgggtggcgaccggcgaatgggtgagtaacgagtatccaacctgccccgcgctccgggacagccccgcgaaagcgggattaataccggatgcggcatggttcccgcatgggctccatgtcaaagattcatcggcgcggg

SEQ ID NO: 945 - DNA, 225 bp, Unknown
  Encodes 16S rRNA from Oscillibacter
agagtttgatcatggctcaggatgaacgctggcggcgtgcctaacacatgcaagtcgaacgagaatcgatggaaagaggcttcggccaatggaagtcgaggacagtggcggacgggtgagtaacacgtgagcaacctgcccttcagagggggacaacagttggaaacgactgctaataccgcataacgtatcgaggaggcatctccatgataccaaagatttatc

SEQ ID NO: 946 - DNA, 225 bp, Unknown
  Encodes 16S rRNA from Asteroleplasma
agagtttgatcctggctcaggataaacgctggcggcgtgcctaatacatgcaagtcgaacgaggtgtagcaatacacctagtggcgtacgggtgagtaacacgttgggaacctgccctttagaccggaataccaagcggaaacgtttgctaatgccggataacagcacgtaagcgcaggcttatgtgctcaaaggcgactattgtcgcgcttaaggatggccctg

SEQ ID NO: 947 - DNA, 225 bp, Unknown
  Encodes 16S rRNA from Anaeroplasma
agagtttgatcctggctcaggataaacgctggcggcgtgcctaatacatgcaagttgaacggagagcttcggctcttagtagcgaacgggtgagtaacacgtaggcaacctgccctgttgactgggataacaagacgaaagacttgctaataccggatgataacgtatatcgcatgatatatggatgaaagttgggacacaacacaacaggatgggcctgcggcg

SEQ ID NO: 948 - DNA, 225 bp, Unknown
  Encodes 16S rRNA from Oscillibacter
agagtttgatcatggctcaggacgaacgctggcggcgtgcttaacacatgcaagtcgaacgaagctctcacgcttgagttttcggacaagagggtgagaagacttagtggcggactggtgagtaacgcgtgagcaacctgccctccggtgggggacaacagttggaaacgactgctaataccgcatgacgtatacggaccgcatgatctgtataccaaagcttaa

SEQ ID NO: 949 - DNA, 225 bp, Unknown
  Encodes 16S rRNA from Bilophila
agagtttgatcatggctcagattgaacgctggcggcgtgcttaacacatgcaagtcgaacgtgaaagtccttcgggacgagtaaagtggcgcacgggtgagtaacgcgtggataatctaccttcaagatggggataacggctggaaacggtcgctaataccgaatacgcttttttatttatctttaaaaggaaagatggcctctgcttgcaagctatcgcttgaa

SEQ ID NO: 950 - DNA, 225 bp, Unknown
  Encodes 16S rRNA from Oscillibacter
agagtttgatcatggctcaggacgaacgctggcggcgtgcctaacacatgcaagtcgaacgaagctccgagaaacaagacttcggtcaagcggaacggatgactgagtggcgaacgggtgagtaacgcgtgaggaacctgcctttcagtgggggacaacagttggaaacgactgctaataccgcatgatgtaccatgggggcatccccggggtaccaaagattta

SEQ ID NO: 951 - DNA, 225 bp, Unknown
  Encodes 16S rRNA from Clostridium IV
agagtttgatcctggctcaggacgaacgctggcggcgtgcttaacacatgcaagtcgaacgaagttccgcggaatgagatttcggtcaaaagaagcggacacttagtggcggacgggtgagtaacgcgtgagtaacctgcctttcagaggggaataacatttggaaacgaatggtaataccgcataacatcaagttatcgcatgatagattgatcaaaggagcaa

SEQ ID NO: 952 - DNA, 225 bp, Unknown
  Encodes 16S rRNA from Prevotella
agagtttgatcctggctcaggatgaacgctagctacaggcttaacacatgcaagtcgaggggcagcgagggggcagcaatgcccctgtcggcgaccggcgcacgggtgagtaacgcgtatccaacctgccccatggtagggaatagcccggagaaatccggattaatgccctatgttctccgacgatggcatctgacttggagcaaagatttatcgccatgggat

SEQ ID NO: 953 - DNA, 225 bp, Unknown
  Encodes 16S rRNA from Geosporobacter
agagtttgatcatggctcaggatgaacgctggcggcgtgcctaacacatgcaagtcgagcgggaaatctccaattgaaggttcgctggaaagcggagatggatagcggcggacgggtgagtaacgcgtaggtaagctgccctatgcacagggatagcctagggaaacctggattaatacctgatgacgctgcgaggtcacatggccatgcagccaaagttttttc

SEQ ID NO: 954 - DNA, 225 bp, Unknown
  Encodes 16S rRNA from Butyricimonas
agagtttgatcatggctcaggatgaacgctagcggcaggcttaacacatgcaagtcgaggggcagcgcgtcgtagcaatacgatggcggcgaccggcgcaagggtgcgtaacgcgtgagcaacatgcccgcaacagggggataaccggaggaaactccgactaataccccataaggatgtagagtggcatcattcagcatctaaacttacgagggttgcggattg

SEQ ID NO: 955 - DNA, 225 bp, Unknown
  Encodes 16S rRNA from Pseudoflavonifractor
agagtttgatcatggctcaggacgaacgctggcggcgtgcttaacacatgcaagtcgaacgagggtgaatgggagcttgcttctgttcacccgagtggcggacgggtgagtaacgcgtgaggaacctgtcttcatcagggggataacttcccgaaagggatgctaataccgcataagaccacggtaccgcatggtattgaggtcaaaggagcgatccggatgaag

SEQ ID NO: 956 - DNA, 225 bp, Unknown
  Encodes 16S rRNA from Barnesiella
agagtttgatcatggctcaggatgaacgctagcgacaggcctaacacatgcaagtcgaggggcagcgagtttgtagcaatacagatgtcggcgaccggcgcacgggtgcgtaacaggtgtgcaacctggcctataccaagggatagcccgctgaaaggcggattaagactttatatgttatggtgagacatctcattataatgaaacgtgagggtataggatggg

SEQ ID NO: 957 - DNA, 225 bp, Unknown
  Encodes 16S rRNA from Selenomonas
agagtttgatcctggctcaggacgaacgctggcggcgtgcttaacacatgcaagtcgaacgagacgattgaaagcttgcttttgaaagtcgagtggcaaacgggtgagtaacgcgtaggcaacctaccttcgagatggggacaacagtccgaaaggactgctaataccgaatgttgtatcaattccgcatggagttggtattaaagatggcctctatttataagc

SEQ ID NO: 958 - DNA, 225 bp, Unknown
  Encodes 16S rRNA from Prevotella
agagtttgatcctggctcaggatgaacgctagcggcaggcttaacacatgcaagtcgaggggcagcgagaggtagcaatactttgtcggcgaccggcgaaagggtgagtaacgcgtgagcgacgtgcccgtcacagggggacaagggctggaaacggcttctgataccccataggaatgtatgcttcatggtgtatgtttgaaagatttatcggtgacggatcgg

SEQ ID NO: 959 - DNA, 225 bp, Unknown
  Encodes 16S rRNA from Enterorhabdus
agagtttgatcatggctcaggatgaacgctggcggcgtgcctaacacatgcaagtcgaacggttaagccggcttcggccgggtatagagtggcgaacgggtgagtaacacgtgaccaacctgccccgcgctccgggatagccccgcgaaagcgagattaataccggatgacgcgggaggggcgcatgcccctcccgccaaagcctcaacggcgcgggatggggtc

SEQ ID NO: 960 - DNA, 225 bp, Unknown
  Encodes 16S rRNA from Oscillibacter
agagtttgatcatggctcaggacgaacgctggcggcgtgcctaacacatgcaagtcgaacgagaatcatatgacggaggcttcggccaactgagtatgaggaaagtggcgaacgggtgagtaacgcgtgaggaacctgcctcggagtgggggacaacagttggaaacgactgctaataccgcataatgtgcctggaaggcatcttccgggtaccaaagctttatg

SEQ ID NO: 961 - DNA, 225 bp, Unknown
  Encodes 16S rRNA from Pelotomaculum
agagtttgatcatggctcaggacaaacgctggcggcgtgcttaacacatgcaagtcgtacggagctgtcaggcggaatccttcgggaggaagcctgagagcttagtggcggacgggtgagtaacgcgtgagcaacctgcccataagagggggataacagttggaaacgactgctaataccgcatgagaccacaacaccgcatggtggaggggtcaaagagcaatc

SEQ ID NO: 962 - DNA, 225 bp, Unknown
  Encodes 16S rRNA from Cellulosilyticum
agagtttgatcatggctcaggataaacgctggcggcgcacataagacatgcaagtcgaacgagtttaatacctagcttgctaggtaagcgactagtggcggactggtgagtaacacgtaaggaacctgcctattagagaggaatacctttgagaaatcagagctaatacctcatatgccttaactactgcatggtagaagagggaaaggagcaatccgctaatag

SEQ ID NO: 963 - DNA, 225 bp, Unknown
  Encodes 16S rRNA from Clostridium IV
agagtttgatcatggctcaggacgaacgctggcggcgtgcttaacacatgcaagtcgaacgagaatccgtggaaagagttttcggacaatggaagcggagggaagtggcggacgggtgagtaacgcgtgaggaacctgccttagagagggggacaacagctggaaacggctgctaataccgcatgacacacagtggaggcatctttactgtgtcaaagatttatc

SEQ ID NO: 964 - DNA, 225 bp, Unknown
  Encodes 16S rRNA from Parabacteroides
agagtttgatcatggctcaggatgaacgctagcgacaggcttaacacatgcaagtcgaggggcagcgggggcgatggcaacattgcctgccggcgaccggcgcactggtgagtaacacgtatgcaacctgccccgcacagggggataacccagagaaatttggcctaataccccgtaacaccgttgggggcatccccggtggttgaaagaggcgactcggtgcgg

SEQ ID NO: 965 - DNA, 225 bp, Unknown
  Encodes 16S rRNA from Papillibacter
agagtttgatcctggctcaggataaacgctggcggcgcacataagacatgcaagtcgaacgaacttaattacttgcttgcaagtaaagcggttagtggcggactggtgagtaacacgtaagaaatctgcctattagtggggaataacagtgagaaatcattgctaataccgcatatgccataagaatcgcatgattctagtgggaaaggagcaattcgctaatag

SEQ ID NO: 966 - DNA, 225 bp, Unknown
  Encodes 16S rRNA from Bacteroides
agagtttgatcctggctcaggatgaacgctagctacaggcttaacacatgcaagtcgcggggcatcgcggtaagtagcaatactttctggcggcgaccggcggatgggtgagtaacgcgtatccaacctggccctatctcggggacagcccctcgaaagagggattaatacccgatgttccctggaattcgcatgttttccagtgcaaaggcatatgtcggatag

SEQ ID NO: 967 - DNA, 225 bp, Unknown
  Encodes 16S rRNA from Prevotella
agagtttgatcatggctcaggatgaacgctagctacaggcttaacacatgcaagtcgaggggcatcatgcaggttgcttgcaacctgtgatggcgaccggcgcacgggtgcgtaacgcgtatccaaccttccccgcagtagggtccagcccgttgaaagacggattaatcccctatgttgtccattgacggcatccgatttggacgaaagatttgatcgctgcgg

SEQ ID NO: 968 - DNA, 225 bp, Unknown
  Encodes 16S rRNA from Hydrogenoanaerobacterium
agagtttgatcatggctcaggagaaacgctggcggcgcacataagacatgcaagtcgaacggaatttagtcgaatgtttacatgagacgaaaatttagtggcggacgggtgagtaacacgtgagcaacctgcctttaggagggggataacattgagaaatcagtgctaataccgcataacgcataatgttcgcatgaacgatatgccaaaggagaaatccaccta

SEQ ID NO: 969 - DNA, 225 bp, Unknown
  Encodes 16S rRNA from Clostridium XlVa
agagtttgatcctggctcaggatgaacgctggcggcgtgcctaacacatgcaagtcgaacggaggtgtccgtacgggtgcttcggcatccagggcaccttagtggcggacgggtgagtaacgcgtggagaacctggcccatgcagggggataacagcgggaaaccgctgctaataccgcataaacgcgaaagggggcatcccttttggcggaaagtgtaagcggc

SEQ ID NO: 970 - DNA, 204 bp, Unknown
  Encodes 16S rRNA from Prevotella
agagtttgatcatggctcaggatgaacgctagctacaggctttggtcaatgggcgaaagcctgaaccagccaagtagcgtgcaggatgacggccctatgggttgtaaactgtttttatacggggataaaacgagggacgtgtccctccttgcaggtaccgtatgaataaggaccggctaattccgtgccagcagccgcggtaat

SEQ ID NO: 971 - DNA, 225 bp, Unknown
  Encodes 16S rRNA from Clostridium IV
agagtttgatcctggctcaggacgaacgctggcggcgcgcctaacacatgcaagtcgaacggagagtgggttttgattctttcgggatgaaaagctcatttcttagtggcggacgggtgagtaacacgtgagcaacctgccttgcagagcgggataacggttggaaacgatcgctaataccgcataatatatgattgtcgcatggctttcatatcaaagatttat

SEQ ID NO: 972 - DNA, 225 bp, Unknown
  Encodes 16S rRNA from Howardella
agagtttgatcctggctcaggataaacgctggcggcgcacataagacatgcaagtcgaacggaagtcgtaattaaaaaggaacaaagatttatcggagtgagattttaattacaatggctttagtggcggactggtgagtaatgtataagtaacctgcctattagaggggaacaacagttggaaacagctgctaataccgcatatgccataagaatcgcatggtt

SEQ ID NO: 973 - DNA, 225 bp, Unknown
  Encodes 16S rRNA from Slackia
agagtttgatcatggctcaggatgaacgctggcggcgtgcctaacacatgcaagtcgaacggttaaggcatcttcggatgcgaataaagtggcgaacgggtgagtaacacgtgaccaacctgccccccgcaccgggacaacgggcggaaacgcctgctaataccggatactccgcgacggacgcctgtccggcgcgggaaagcccaggcggcgggggatggggtc

SEQ ID NO: 974 - DNA, 225 bp, Unknown
  Encodes 16S rRNA from Methylobacter
agagtttgatcatggctcagaatgaacgctggcggtatgcttaatacatgcaagtcgaacgagaaagtccagcaatggatgagtaaagtggcgtacgggtgagtaatatataggaatctacccagtaatgaggaataagcactggaaacggtgtctaataccacatactaccatttatttgggaaagggttagtagcaatactaacttgttattggatgagccta

SEQ ID NO: 975 - DNA, 225 bp, Unknown
  Encodes 16S rRNA from Treponema
agagtttgatcctggctcagaacgaacgctggcggcgcgtcttaagcatgcaagtcgggcgggatcgtggtgcttgcaccacgtgagagcggcggactggcgaggagcgcgtgggtgacgcaccccccggacggggacagccggcagaaatgccgggtgataccggatgaggtcccccttgttggaggagggggaggaaaggggcttcggccccgccgggggagc

SEQ ID NO: 976 - DNA, 187 bp, Unknown
  Encodes 16S rRNA from Clostridium XlVa
agagtttgatcctggctcaggataaacgctggcggcgtgcttaattggacaatgggggcaaccctgatccagcgacgccgcgtgagcgatgaagtatctcggtatgtaaagctctatcagcagggaagataatgacggtacctgactaagaagcaccggctaaatacgtgccagcagccgcggtaat

SEQ ID NO: 977 - DNA, 225 bp, Unknown
  Encodes 16S rRNA from Devosia
agagtttgatcatggctcagaacgaacgctgtcgacatgcttaacacatgcaagtcgtacgggtataacttgttataccagtggcaaacgggtgagtaatacgtagatatgtacccagtagtctcgaataacagttggaaacgattgataatacgagatactatggtaacatcaaaggtttagcaataaactgctattggagcagtctacggtggattagatagt

SEQ ID NO: 978 - DNA, 225 bp, Unknown
  Encodes 16S rRNA from Ruminococcus
agagtttgatcatggctcaggacgaacgctggcggcacgcttaacacatgcaagtcgaacggagatattcccttcgggggataacttagtggcggacgggtgagtaacacgtgagcaacctgccttacagagaggaataatgactggaaacggtcactaatacctcataaaatatttgaatcgcatggttcggatatcaaagatttatcgctgtaagatgggctc

SEQ ID NO: 979 - DNA, 225 bp, Unknown
  Encodes 16S rRNA from Lachnospiracea incertae sedis
agagtttgatcctggctcaggatgaacgctggcggcgtgcctaacacatgcaagtcgaacgaagcacccctcccgaagattgacgtagcttgctacagattgattcaattggggtgacttagtggcggacgggtgagtaacgcgtgggtaacctgccctatagagggggacaacagttggaaacgactgctaataccgcataacacatttgcaccgcatgatgcg

SEQ ID NO: 980 - DNA, 225 bp, Unknown
  Encodes 16S rRNA from Clostridium III
agagtttgatcatggctcaggacgaacgctggcggcgtgcctaacacatgcaagtcgaacggagttgttttggatgatgccttcgggtggattccgattcaacttagtggcggacgggcgagtaacgcgtgaataacctgcccataagaggggaataatccatggaaacgtggactaataccgcatattgtaacgaagtcgcatggctttgttatgaaagattta

SEQ ID NO: 981 - DNA, 225 bp, Unknown
  Encodes 16S rRNA from Methanobrevibacter
agagtttgatcatggcagatgctactgctattgggattcgattaagccatgcaagtcgaacgagtttaggctcgtggcgtacggctcagtaacacgtggataacctacccttaggactgggataaccctgggaaactggggataatactagataggcaatttttcctggaatggttttttgtttaaatgttttttcgcctaaggatgggtctgcggccgattagg

SEQ ID NO: 982 - DNA, 225 bp, Unknown
  Encodes 16S rRNA from Paraprevotella
agagtttgatcatggctcaggatgaacgctagcggcaggcttaacacatgcaagtcgaggggcagcgagtcggtagcaatactgatgtcggcgaccggcgcacgggtgagtaacgcgtatgcaacctttcccagacagggggatagcccagggaaacttggattaataccccgtaggccatggatgggcatccatctatggttaaagttccggcggtctggggtg

SEQ ID NO: 983 - DNA, 225 bp, Unknown
  Encodes 16S rRNA from Desulfobulbus
agagtttgatcctggctcagaacgaacgctggcggcgtgcttaacacatgcaagtcgaacgcgaaagcggcttcggtcgtgagtagagtggcgcacgggtgagtaacgcgtagataacctgtcttcatattcgggataacacgccgaaaggggtactaataccggatatactcgcatttcaataggtgaggcgaggaaaggtggcctctgattcaagctactgta

SEQ ID NO: 984 - DNA, 225 bp, Unknown
  Encodes 16S rRNA from Butyricicoccus
agagtttgatcctggctcaggacgaacgctggcggcgtgcctaacacatgcaagtcgaacggaactattttgaaggatctcttcggagtgacggatttttagtttagtggcgatcggtagccggactgagaggttgatcggccacattgggactgagacacggcccagactcctacgggaggcagcagtgggggatattgcgcaatgggggcaaccctgacgcag

SEQ ID NO: 985 - DNA, 225 bp, Unknown
  Encodes 16S rRNA from Clostridium XlVa
agagtttgatcctggctcaggatgaacgctggcggcgtgcctaacacatgcaagtcgagcggagatgcacattggatgaagattcgtccgaatcctggtgcatcttagcggcggatgggtgagtaacgcgtggacaacctgcccgcaacagggggataacagctggaaacggctgataataccgcatatgcacacggaaccgcatggttttgggtggaaagatta

SEQ ID NO: 986 - DNA, 225 bp, Unknown
  Encodes 16S rRNA from Dialister
agagtttgatcctggctcaggacgaacgctggcggcgtgcttaacacatgcaagtcgaacgggaggaaaagagaagcttgcttctttttgaatctagtggcaaacgggtgagtaacacgtaaacaacctgccttcaggatggggacaacagacggaaacgactgctaataccgaatgtgttccggagaccgcatgatttccggaagaaaggatggcctctattta

SEQ ID NO: 987 - DNA, 225 bp, Unknown
  Encodes 16S rRNA from Selenomonas
agagtttgatcatggctcaggacgaacgctggcggcgtgcttaacacatgcaagtcgaacgagacgattttaagcttgcttagatgagtcgagtggcaaacgggtgagtaacgcgtagacaacctgccgcaaagatggggacaacagtccgaaaggactgctaataccgaatgttgtatcgtttccgcatggagatgatattaaagatggcctctacttgtaagc

SEQ ID NO: 988 - DNA, 225 bp, Unknown
  Encodes 16S rRNA from Spirochaeta
agagtttgatcctggctcagaacgaacgctggcggcgcgtcttaagcatgcaagtcgagcggtaaggaggtagcttgctacttccctagagcggcggactggtgagtaacgcgtgggtgacgtaccctttggttggggatagccggtagaaataccgggtaataccgaataagacctctggtagaaagattagagaggaaagcggctccggccgcgccgaaggaa

SEQ ID NO: 989 - DNA, 225 bp, Unknown
  Encodes 16S rRNA from Clostridium IV
agagtttgatcatggctcaggacaaacgctggcggcatgcctaacacatgcaagtcgaacggagttcagttttagatcccttcggggtgacgaagcgaagacttagtggcggacgggtgagtaacgcgtgaggaacctgcctttcagagggggataacgtttggaaacgaacgctaataccgcataacacaaccgagtggcatcgcttggttgtcaaaggagcaa

SEQ ID NO: 990 - DNA, 225 bp, Unknown
  Encodes 16S rRNA from Cellulosilyticum
agagtttgatcatggctcaggatgaacgctggcggcgtgcataacacattcaagtcgaacggagttatttccttcgggggataacttagtggcggacgggtgagtaacgcgtgagtaacctgccatacacagggggataacgaccggaaacagtcgctaataccgcataacgcatgaaggtcacatggtctttatgccaaagatttatcggtgtatgatggactc

SEQ ID NO: 991 - DNA, 225 bp, Unknown
  Encodes 16S rRNA from Prevotella
agagtttgatcctggctcaggatgaacgctagctacaggcttaacacatgcaagtcgcggggcagcatggaggttgcttgcaacctctgatggcgaccggcgcacgggtgcgtaacgcgtatccaacctgccccttactctggaatagcccggcgaaagtcggattaatgccggatgttgtcagacgaggacatctgaatctgaccaaaggccctagggtcggta

SEQ ID NO: 992 - DNA, 225 bp, Unknown
  Encodes 16S rRNA from Pseudoflavonifractor
agagtttgatcatggctcaggacgaacgctggcggcgtgcttaacacatgcaagtcgaacgagaatcatatgacggagttttcggacaactgattatgaggaaagtggcggacgggtgagtaacgcgtgaggaacctgcctcggagtgggggataacacatcgaaaggtgtgctaataccgcataatgtatatcattcgcatgggagatataccaaagatttatt

SEQ ID NO: 993 - DNA, 225 bp, Unknown
  Encodes 16S rRNA from Clostridium III
agagtttgatcatggctcaggacgaacgctggcggcatgcctaacacatgcaagtcgaacggagatagtagagcttgctttacgatcttagtggcggacgggtgagtaacgcgtgagcaacctgcccttcagtggggaataatgttgagaaatcgacactaataccgcataaagtatcatgatcgcatggtcgagataccaaaggagcaattcgctgaaggatgg

SEQ ID NO: 994 - DNA, 225 bp, Unknown
  Encodes 16S rRNA from Oscillibacter
agagtttgatcctggctcaggacgaacgctggcggcgtgcttaacacatgcaagtcgaacgaagctctcacgcttgagttttcggacaagagggtgagaagacttagtggcggactggtgagtaacgcgtgagcaacctgccctccggtgggggacaacagttggaaacgactgctaataccgcataatgtacagagaccgcatgatctttgtaccaaagcttta

SEQ ID NO: 995 - DNA, 225 bp, Unknown
  Encodes 16S rRNA from Faecalibacterium
agagtttgatcatggctcaggatgaacgctggcggcgtgcataacacattcaagtcgaacggagttgcgatagaaagaggcttcggccaatggaaattgtaacttagtggcggacgggtgagtaacgcgtgagcaacctacctatgcgcgggggacaacagttggaaacgactgctaataccgcataaatcatgataaaggcatctttaacatggcaaagattaa

SEQ ID NO: 996 - DNA, 225 bp, Unknown
  Encodes 16S rRNA from Clostridium XlVb
agagtttgatcatggctcaggatgaacgctggcggcgtgcttaacacatgcaagtcgagcgaaggacaaagagcttgctttttgttacttagcggcggacgggtgagtaacgtgtgggcaatctgccctatgcagaggaataacatagagaaatttatgctaatgcctcataaactcttagaatcgcatggtttatagagaaaagatttatcggcataggaggag

SEQ ID NO: 997 - DNA, 225 bp, Unknown
  Encodes 16S rRNA from Eubacterium
agagtttgatcctggctcaggatgaacgctggcggcgtgcctaacacatgcaagtcgagcgagaaatcaggtgttgaaacttcggtagatacatctggtggacagcggcggacgggtgagtaacgcgtgggaaacctgcccttatctgagggatagccgagagaaatttcgagtaatacctcataatgcatcgagaccgcatggccatgatgccaaagatttatc

SEQ ID NO: 998 - DNA, 225 bp, Unknown
  Encodes 16S rRNA from Clostridium III
agagtttgatcatggctcaggacgaacgctggcggcgtgcctaacacatgcaagtcgaacggagccttttgccggaagggagcttgctccaggaaagtaaaagacttagtggcggacgggtgagtaacgcgtggataacctgccttagacagggggataacacagggaaacttgtgctaataccgcataagaccacactatggcatcatagaggggtcaaaggag

SEQ ID NO: 999 - DNA, 225 bp, Unknown
  Encodes 16S rRNA from Prevotella
agagtttgatcatggctcaggatgaacgctagctacaggcttaacacatgcaagtcgaggggcagcacggttgttgcttgcaacaactggtggcgaccggcgcacgggtgagtaacgcgtatccaacctgcccgcaaccgcggaatagcccgccgaaaggcggattaatgccgcatgagctcgcgcgagggcatcatttcgcgagcaaaggttcgttccggttgc

SEQ ID NO: 1000 - DNA, 225 bp, Unknown
  Encodes 16S rRNA from Paenibacillus
agagtttgatcctggctcaggatgaacgctggcggcgtgcctaatacatgcaagtcgaacggatgaggtagcaataccgattcagtggcgaacgggtgagtaacacgtaggtaacctgcccttaagactgggatacccaggcgaaagcttggctaataccggatatgagtagaagaggcatctcctttacttgaaagttgcgtttgcaacacttttggatggacc

SEQ ID NO: 1001 - DNA, 225 bp, Unknown
  Encodes 16S rRNA from Pedobacter
agagtttgatcatggctcaggatgaacgctagcggcaggcctaatacatgcaagtcgaacggtaaacgccccttcgggggtgtgagagtggcgcacgggtgcgtaacgcgtatgcaacccacccgctgccgggggatagcccggagaaatccgaattaataccccatgaggaggagatgaggcatctcatctttttcaaaacttcggtggcggcggacgggcatg

SEQ ID NO: 1002 - DNA, 225 bp, Unknown
  Encodes 16S rRNA from Butyricicoccus
agagtttgatcctggctcaggataaacgctggcggcgcacataagacatgcaagtcgaacgggaactttattgaagttatctgatataaagttctagtggcggactggtgagtaatgtataagcaacctgcctacaagaggggaataacagtgagaaatcattgctaataccgcataagctgtgagtatcgcatggtacaaacagaaaaggaagcaattctgctt

SEQ ID NO: 1003 - DNA, 225 bp, Unknown
  Encodes 16S rRNA from Clostridium XlVa
agagtttgatcatggctcaggatgaacgctggcggcgtgcctaacacatgcaagtcgaacggagtgttttaagccgattcttcggatgaagctttttacacttagtggcggacgggtgagtaacgcgtggagaacctgcctcacacagggggacagcagctggaaacggctgataataccgcatatgcccacgataccgcatggtattgcggggaaacatttatg

SEQ ID NO: 1004 - DNA, 225 bp, Unknown
  Encodes 16S rRNA from Roseburia
agagtttgatcatggctcaggatgaacgctggcggcgtgcctaacacatgcaagtcgaacggacccatggagatgattagcttgctatgaatttccggaaggttagtggcggacgggtgagtaacgcgtgggtaacctgcctcatacagggggatagcagttggaaacgactggtaataccgcataagcgcacagtaccgcatggtacagtgtgaaaagctccga

SEQ ID NO: 1005 - DNA, 225 bp, Unknown
  Encodes 16S rRNA from Hydrogenoanaerobacterium
agagtttgatcatggctcaggacgaacgctggcggcgtgcctaacacatgcaagtcgaacggactgataggagcttgctccttgaaagttagtggcggacgggtgagtaacgcgtgaggaacctgcctttcagagggggataacgtcttgaaaaggacgctaataccgcatgacaccggattgtcgcatggcagaccggtcaaaggagcaatccgctgaaagatg

SEQ ID NO: 1006 - DNA, 225 bp, Unknown
  Encodes 16S rRNA from Adhaeribacter
agagtttgatcctggctcaggatgaacgctggcggcaggcttaatacatgcaagtcgaacggtaaggccgagcgtagcaatacgcgaggtacacgagtggcgcacgggtgcgtaacgcgtatgcaacctgcccccttccgggacaaaacgtcgagaaattggcgctaatatcccatggcgacctcgggaggcatctctgggggtccaaagattcattggaagggg

SEQ ID NO: 1007 - DNA, 225 bp, Unknown
  Encodes 16S rRNA from Eubacterium
agagtttgatcatggctcaggattaacgctggcggcgtgcctaacacatgcaagtcgagcgagaattaggaaaatgatgcttcggttgattttttctaaggacagcggcggacgggtgagtaacgcgtgggcaacctgcccctttccggaggatagccaagggaaactttgaataatactccataaagcaagagtaccgcatgatacacttgccaaagatttatc

SEQ ID NO: 1008 - DNA, 225 bp, Unknown
  Encodes 16S rRNA from Bacteroides
agagtttgatcctggctcaggatgaacgctagctacaggcttaacacatgcaagtcgaggggcagcattaggtcagcttgctgacctagatggcgaccggcgcacgggtgagtaacgcgtatccaacctgccccctacccggggatagccttgcgaaagtaagattaatacccggtgctgttatgtttccgcatgggaatataacgaaagattcatcggtagggg

SEQ ID NO: 1009 - DNA, 225 bp, Unknown
  Encodes 16S rRNA from Victivallis
agagtttgatcctggctcagaacgaacgctggcggcatggattaggcatgcaagtcgaacgaagcagcaatgcttagtggcggaagggtgaggaacgcgtgagtaatctgcccccaagttgggaataacagctggaaacggttgctaataccgaatgtggctgcctggtcgcatgatcgggcagttaaagatttattgcttggggatgagctcgcgtcccattag

SEQ ID NO: 1010 - DNA, 225 bp, Unknown
  Encodes 16S rRNA from Roseburia
agagtttgatcatggctcaggatgaacgctggcggcgtgcttaacacatgcaagtcgaacgaagttagattggaatgcggcttcggccaaaggaagatttaattgagtggcggacgggtgagtaacgcgtgggtaacctaccttacacagggggataacgattggaaacgatcgctaataccgcataagaccacagtaccgcatggtacaggggtaaaagaatta

SEQ ID NO: 1011 - DNA, 225 bp, Unknown
  Encodes 16S rRNA from Treponema
agagtttgatcctggctcagaacgaacgctggcggcgcgtcttaagcatgcaagtcgagcgggaatacctagcttgctaggtatgagagcggcggactggtgagtaacacgtagataacgcaccctctagacggggatagctgccagaaatggcagataataccggatgtgaacgtatgccgtgaaggtgtacgtggaaaggagcttcggctccgctagaggaac

SEQ ID NO: 1012 - DNA, 225 bp, Unknown
  Encodes 16S rRNA from Prevotella
agagtttgatcatggctcaggatgaacgctagctacaggcttaacacatgcaagtcgaggggcatcacggggttggcttgccatccctggtggcgaccggcgcacgggtgagtaacgcgtatccaacctgccccgaaccgcggtatagcccgccgaaaggcggattaatcccgcatgtggtcgtgagatgacatctgaccacgactaaaggtattttccggttcg

SEQ ID NO: 1013 - DNA, 225 bp, Unknown
  Encodes 16S rRNA from Prevotella
agagtttgatcatggctcaggatgaacgctagctacaggcttaacacatgcaagtcgaggggcagcactgggtgcgcttgcgcaccctggtggcgaccggcgcacgggtgagtaacgcgtatccaacctgcccgcaaccgcggaatagcccgccgaaaggcggattaatgccgcatgagctcgcgcgatggcatcttatcgcgagcaaaggtgttttccggttgt

SEQ ID NO: 1014 - DNA, 225 bp, Unknown
  Encodes 16S rRNA from Hydrogenoanaerobacterium
agagtttgatcatggctcaggacgaacgctggcggcgcgcctaacacatgcaagtcgaacgggactagtgaccggagattagagcttgttgttctagtttgcgatcactagttcagtggcggacgggtgagtaaagcatgagcaacctgcctagtagagggggatagcttttggaaacagaagataataccgcatgaatcagagatttcgcatgagatttttgga

SEQ ID NO: 1015 - DNA, 225 bp, Unknown
  Encodes 16S rRNA from Clostridium XlVa
agagtttgatcatggctcaggatgaacgctggcggcgtgcctaacacatgcaagtcgaacgagggtcctaaacctgagattcgtcgaaggggaaggaattccgagtggcggatgggtgagtaacgcgtggagaacctgccctttgctgggggataacaactggaaacggttgacaataccgcataagctcgatggaccgcatgatctatcgaggaaagatttatc

SEQ ID NO: 1016 - DNA, 225 bp, Unknown
  Encodes 16S rRNA from Bacteroides
agatttgatcctggctcaggatgaacgctagctacaggcttaacacatgcaagtcgaggggcagcatggtcttagcttgctaaggccgatggcgaccggcgcacgggtgagtaacgcgtatccaacctgccgtccagtaggggacagcccgtagaaatgcggattaataccctatgttctccgaggatgacatcagattcggagtaaagattcatcgctggacga

SEQ ID NO: 1017 - DNA, 155 bp, Unknown
  Encodes 16S rRNA from Bacteroides
agagtttgatcctggctcaggatgaacgctagctacaggcttaacacatgcaagtcgaggggtaacgcgaggaagacagcacgtaaataaacgtgttatttgacgttagagtgtgaataagcaccggcaaactccgtgccagcagccgcggtaat

SEQ ID NO: 1018 - DNA, 225 bp, Unknown
  Encodes 16S rRNA from Lactobacillus
agagtttgatcctggctcaggatgaacgctggcggcgtgcctaatacatgcaagtcgaacgagattttattaattgattacttcggtatgatttttctaaaatcgagtggcggacgggtgagtaacacgtgggtaacctgcccttaagtaggggataacatttggaaacagatgctaataccgtataaatctcagaaacacatgtttctgagctgaaaggcggct

SEQ ID NO: 1019 - DNA, 225 bp, Unknown
  Encodes 16S rRNA from Adlercreutzia
agagtttgatcctggctcaggatgaacgctggcggcgtgcctaacacatgcaagtcgaacggttaagccggcttcggccgggtatacagtggcgaacgggtgagtaacacgtgaccaacctgccccgcgctccgggacaaccgctggaaacggcggctaataccggatactcccgcctccccgcatggggcggcggggaaagccccgacggcgcgggatggggtc

SEQ ID NO: 1020 - DNA, 225 bp, Unknown
  Encodes 16S rRNA from Dethiosulfovibrio
agagtttgatcatggctcaggatgaacgctggcggcgtgcttaacacattcaagtcgaacggagtgtttttgaaagcttgcttttgagaatacttagtggcggacgggtgagtaatgcatgagcaacctgcctttaagagggggataacacagagaaatctgtgctaataccgcatagaacactgagatggcatcatcatagtgggaaaggagcaatccgcttaa

SEQ ID NO: 1021 - DNA, 225 bp, Unknown
  Encodes 16S rRNA from Lutispora
agagtttgatcatggctcaggacgaacgctggcggcgtgcttaaaacatgcaagtcgaacggagattttagggagcttgcttcttgaaatcttagtggcggacgggtgagtaacacgtgagcaacctgcctatcacagggggataacacttagaaataggtgctaataccgcatatgaccacagaccggcatcggtcagaggtgaaaggagttaaatctggtgat

SEQ ID NO: 1022 - DNA, 225 bp, Unknown
  Encodes 16S rRNA from Turicibacter
agagtttgatcctggctcaggatgaacgctggcggcgtgcctaatacatgcaagtcgaacggagcacttcggtgcttagtggcgaacgggtgagtaacacataaacaatctacccttaagtctgggataacggttggaaacgaccgctaataccggataggtaaaaccgaggcatcttggttttattaaagctgggctacagcgctaaaggatgagtttatgtcg

SEQ ID NO: 1023 - DNA, 225 bp, Unknown
  Encodes 16S rRNA from unknown taxa
agagtttgatcctggctcaggacgaacgctggcggtgtgcctcatacatgcaagtcgaacgataaggttccttcgggaatacataagtggcggacgggtgagtacaacataggaaatctgccctaaactgggggacaacagagggaaactcctgctaataccccatacgagcttggttgaaataccaatcttgaaagctccggcggtttgggatgagcctgtgcc

SEQ ID NO: 1024 - DNA, 225 bp, Unknown
  Encodes 16S rRNA from Clostridium sensu stricto
agagtttgatcatggctcaggacgaacgctggcggcatgcctaacacatgcaagtcgaacggaggtggaaacaccttagtggcgaacgggtgagtaacgcgtgagtaacctgccttatacacagggataccagttagaaatgactgctaataccggataagaccacagtccggcatcggacaggggtcaaagtgaattagcggtataagatgggctcgcgtccaa

SEQ ID NO: 1025 - DNA, 225 bp, Unknown
  Encodes 16S rRNA from unknown taxa
agagtttgatcatggctcaggatgaacgctggcggcgtgcttcatacatgcaagtcgaacgtgaagctgacttcggtcagtggaaagtggcggacgggtgagtaatacataggaaatctgcccttaggaaggggataacagtcggaaacgattgctaataccctatatgagcttggttgcaataccaatcttgaaaactccggtgcctaaggatgagcctgtgcc

SEQ ID NO: 1026 - DNA, 225 bp, Unknown
  Encodes 16S rRNA from Bulleidia
agagtttgatcatggctcaggatgaacgctggcggcgtgcctaatacatgcaagtcgaacgagagcgaccagcttgctggtcaatcgagtggcgaacgggtgagtaacacataaacaatctgccctggagactgggataacgtagggaaacccacgctaataccggataggcagtaaggggacatccccatactgttaaagctgggctacagcactgcaggatga

SEQ ID NO: 1027 - DNA, 225 bp, Unknown
  Encodes 16S rRNA from Aquiflexum
agagtttgatcatggctcaggatgaacgctggcggcaggcttaatacatgcaagtcgaacggtaaggccgagcgtagcaatacgcgaggtacacgagtggcgcacgggtgcgtaacgcgtatgcaacctgcccccttccgggacaaaacgtcgagaaattggcgctaatatcccatggcgacccttgggggcatccccgggggtccaaagattcattggaagggg

SEQ ID NO: 1028 - DNA, 225 bp, Unknown
  Encodes 16S rRNA from Lachnospiracea incertae sedis
agagtttgatcctggctcaggatgaacgctggcggcgtgcttaacacatgcaagtcgaacgaagcacttattgagaaccttcgggtgatcggcaagtgactgagtggcggacgggtgagtaacgcgtgggtaacctgccctgtacagggggataacagccagaaatggctgctaataccgcataagcccgggggggagcattttctcccggggaaaactccggtg

SEQ ID NO: 1029 - DNA, 225 bp, Unknown
  Encodes 16S rRNA from Lachnospiracea incertae sedis
agagtttgatcctggctcaggatgaacgctggcggcgtgcttaacacatgcaggtcgaacgaagccccggaagcggatcttcggaaaagcggacgggagacttagtggcggacgggtgagtaacgcgtgggcaacctgcccttgggagggggacaacagccggaaacggctgctaataccgcatgatccggcggctccgcatgggggtgccgggaaaggagcgat

SEQ ID NO: 1030 - DNA, 225 bp, Unknown
  Encodes 16S rRNA from Clostridium III
agagtttgatcctggctcaggataaacgctggcggcgcacataagacatgcaagtcgaacgaacgagtacagattctttacgtttttgtatgagttagtggcggactggtgagtaacgcgtgagcaacctgcctataagaggggaataacggagagaaattttcgctaataccgcataagctgatagagtcgcatgacttagtcagaaaaggagcaatccgctta

SEQ ID NO: 1031 - DNA, 225 bp, Unknown
  Encodes 16S rRNA from Roseburia
agagtttgatcatggctcaggatgaacgctggcggcgtgcttaacacatgcaagtcgaacggacttaccctggatgaggccctcgggcggattcctaagtaagttagtggcggacgggtgagtaacgcgtgggtaacctgcctcacattgggggataacgattggaaacgatcgctaataccgcataagaccacggcaccgcatggtgctgaggtaaaaactccg

SEQ ID NO: 1032 - DNA, 225 bp, Unknown
  Encodes 16S rRNA from Glaciecola
agagtttgatcatggctcaggatgaacgctggcggcgtgcctaacacatgcaagtcgaacgggactatttggggaatattgcacaatgggggaaaccctgatgcagccatgccgcgtgtgtgaagaaggccttcgggttgtaaagcacttttgcattcgaggaagacagcgtataaacaaatgcgctatttgacgttagagtgtgaataagcaccggcaaactcc

SEQ ID NO: 1033 - DNA, 225 bp, Unknown
  Encodes 16S rRNA from Clostridium XlVa
agagtttgatcatggctcaggatgaacgctggcggcgtgcttaacacatgcaagtcgaacgaggaattaacattgaaattttcggatggatttgttttttccgagtggcggacgggtgagtaacgcgtgggtaacctgccttacacagggggacaacagccggaaacggctgctaataccgcataacctgctagagtcgcatgactcagacagaaaagatttatc

SEQ ID NO: 1034 - DNA, 225 bp, Unknown
  Encodes 16S rRNA from Hydrogenoanaerobacterium
agagtttgatcatggctcaggagaaacgctggcggcgcacataagacatgcaagtcgaacggaaccaagtcgaatgtttacatgagacggaagtttagtggcggacgggtgagtaacacgtgagcaacctgcctttaagagggggataacattgagaaatcagtgctaataccgcataaagcatctttaccgcatgatagagatagccaaaggagaaatccgctt

SEQ ID NO: 1035 - DNA, 225 bp, Unknown
  Encodes 16S rRNA from Clostridium IV
agagtttgatcctggctcaggatgaacgctggcggcgtgcataacacattcaagtcgaacgaagcaccggcgaggaagtcttcggacggaattgcccttgacttagtggcggacgggtgagtaacgcgtgagcaaccttcctggcagtgagggataacacagggaaacttgtgctaataccgcatgacgcacgattgtcgcatggcagacgtgccaaagattaat

SEQ ID NO: 1036 - DNA, 225 bp, Unknown
  Encodes 16S rRNA from Sphaerobacter
agagtttgatcatggctcaggataaacgctggcggcgtgcctaatgcatgcaagtcggacgggagccccttcgggggtcgaccgtggcggacgggtgaggaacacgtggctaacctgcccatcagtgggggataactccgggaaaccggagctaagaccgcatacgttcagtttcggggacggaattgaggaaagctttcgagcgctgatggagggggctgcggc

SEQ ID NO: 1037 - DNA, 225 bp, Unknown
  Encodes 16S rRNA from unknown taxa
agagtttgatcctggctcaggacgaacgctggcggcgtgcttcatacatgcaagtcgaacgataaggtctcttcggagacacataagtggcggacgggtgagtaatgtgtagagaatctgccctttagtgggggacaacagttggaaacgactgctaataccgcatatgcgcgtacctgtaatggtattcgtgaaaactccggtgctaaaggatgagtctgcatc

SEQ ID NO: 1038 - DNA, 225 bp, Unknown
  Encodes 16S rRNA from Prevotella
agagtttgatcctggctcaggatgaacgctagctacaggcttaacacatgcaagtcgaggggcagcatgtcggtggcttgccaccggcgatggcgaccggcgcacgggtgagtaacgcgtatccaacctgccctcaaccgcggaatagcccgccgaaaggcggattaatgccgcatgagctcgcgcgggggcatctgcccgcgagcaaaggtttgttccggttgg

SEQ ID NO: 1039 - DNA, 225 bp, Unknown
  Encodes 16S rRNA from Turicibacter
agagtttgatcctggctcaggatgaacgctggcggcgtgcctaatacatgcaagtcgaacgagatagcaatatcgagtggcgaacgggtgagtaacacgtaggtaacctgccttacagtttgggataccctggcgaaagctaggctaataccgaataattggattggaggcatctccgatctctaaaaggggcccttaaagcctcgctgaatgatggacctgcgg

SEQ ID NO: 1040 - DNA, 225 bp, Unknown
  Encodes 16S rRNA from Ruminococcus
agagtttgatcatggctcaggacgaacgctggcggcacgcttaacacatgcaagtcgaacggagatcattctttcggggatgatcttagtggcggacgggtgagtaacacgtgagcaacctgccttacggagaggaataatgattggaaacgatcactaataccacataacatataggtgatgcatatcagctatatcaaagatttatcgccgtaagatgggctc

SEQ ID NO: 1041 - DNA, 225 bp, Unknown
  Encodes 16S rRNA from Clostridium IV
agagtttgatcatggctcaggattaacgctggcggcgtgcataacacattcaagtcgaacggagaaggggcttcggccccggatcagtggcggacgggtgagtaacgcgtgagtaacctgcctgtgtgaggggaataacagatcgaaaggcctgctaataccgcatgacgtacgactgtcgcatggcagaggtaccaaagatttatcgcacacagatggactcgc

SEQ ID NO: 1042 - DNA, 225 bp, Unknown
  Encodes 16S rRNA from Clostridium XlVa
agagtttgatcatggctcaggatgaacgctggcggcgcgcataacacatgcaagtcgaacggagtgtaattgaaacctagtgattttacacttagtggcggacgggtgagtaacgcgtgggtaacctgcctggtattgggggacaacagttagaaatgactgctaataccgcatacgacgtcggggaggcatctccctgacgggaaaggaattatccgatatcag

SEQ ID NO: 1043 - DNA, 225 bp, Unknown
  Encodes 16S rRNA from Saccharofermentans
agagtttgatcatggctcaggacgaacgctggcggcgtgcctaacacatgcaagtcgagcggaactgattctggaaagcttcggccggaagggatgagtttagcggcggacgggtgagtaacgcgtgagcaacctgtccttcacagggggataagacagcgaaagttgttctaataccgcataggaccacgggtgggcatccatctggggtgaaaggagcaatcc

SEQ ID NO: 1044 - DNA, 225 bp, Unknown
  Encodes 16S rRNA from Clostridium XlVb
agagtttgatcctggctcaggatgaacgctggcggcgtgcttaacacatgcaagtcgaacgaagatatttaagatgaaggcttcggtctgatttttttatattcttagtggcggacgggtgagtaacgcgtgggcaacctgccctttactggggaataatcattggaaacgatgactaataccgcatgtcaccgaggactggcatctttcctcggaaaaaggagc

SEQ ID NO: 1045 - DNA, 225 bp, Unknown
  Encodes 16S rRNA from Ruminococcus
agagtttgatcatggctcaggacgaacgctggcggcacgcttaacacatgcaagtcgaacgaaaaagtttcaccgcagcttgctgcaccgaaactttttagtggcggacgggtgagtaacacgtgagcaatctgccttttagagggggataccagttggaaacgactgttaataccgcataacatatcgaaaccgcatgattttgatatcaaagatttatcgctg

SEQ ID NO: 1046 - DNA, 178 bp, Unknown
  Encodes 16S rRNA from Fibrobacter
agagtttgatcctggctcaggatgaacgctggcggcgcgcctaacacatgcaagtcgaacggaagaagcatttcggtgtgtaaaccactgtcgtgagggaataaggcgtcttctcggagacgttgaatgtacctcgaaaggaagcaccggcaaacttcgtgccagcagccgcggtaat

SEQ ID NO: 1047 - DNA, 225 bp, Unknown
  Encodes 16S rRNA from Proteiniclasticum
agagtttgatcatggctcaggacgaacgctggcggcgtgcttaacacatgcaagtcgtacggggtatagcaatatacctagtggcgaacgggtgagtaacacgtgagtaacctgccctatacagggggacaacagctggaaacggctgctaataccgcataagaccacagcaccgcatggtgcagaggtaaaaggctacggccggtataggatgggcttgcgtac

SEQ ID NO: 1048 - DNA, 225 bp, Unknown
  Encodes 16S rRNA from Anaeroplasma
agagtttgatcctggctcaggattaacgctggcggcgtgcctaatacatgcaagtcgaatggttagcttgctaaccatggcgaacgggtgagtaacacgtaggcaacctgtctataagacgaggataaccattggaaacgatggataatactggataggatattggaaggcatcttctaatatttaaagatttatcactaatagaggggcctgcggcgcattagc

SEQ ID NO: 1049 - DNA, 225 bp, Unknown
  Encodes 16S rRNA from unknown taxa
agagtttgatcctggctcaggacgaacgctggcggtgtgcctcatacatgcaagtcgaacgataaggttccttcgggaatacataagtggcggacgggtgagtacaacataggaaatctgccctaaagcgggggacaacagagggaaacttctgctaataccccatatgagcttggttgaaataccaatcttgaaagatttatcactttaggatgagcctgtgcc

SEQ ID NO: 1050 - DNA, 225 bp, Unknown
  Encodes 16S rRNA from Algoriphagus
agagtttgatcctggctcaggatgaacgctggcggcaggcctaatacatgcaagtcgcgcgggaattgccctttcgggggtgatgagagcggcggacgggtgcgtaacgcgtatgcaaccaacccccgacaggcggatagccggtggaaacgccggataatacgccatgaaccctttttggggcatcccagggaggggaaagcggagacgcggtcggggacgggc

SEQ ID NO: 1051 - DNA, 225 bp, Unknown
  Encodes 16S rRNA from Clostridium XlVa
agagtttgatcatggctcaggatgaacgctggcggcgtgcttaacacatgcaagtcgaacgaagcgtctcgcccgaagaagcgaagtgcttgcacggagtggattcaattgagacgacttagtggcggacgggtgagtaacgcgtgggtaacctgccgtatgcagggggacaacagttggaaacgactgctaataccgcataagcgcacggctcggcatcgagca

SEQ ID NO: 1052 - DNA, 225 bp, Unknown
  Encodes 16S rRNA from Howardella
agagtttgatcatggctcaggataaacgctggcggcgcacataagacatgcaagtcgaacggacttaacttctagcttgctagaagagcggttagtggcggactggtgagtaacacgtaagaaatctgcctatcagaggggaataacagtgagaaatcattgctaataccgcatatgccataatcatcgcatgatgatagtgggaaagaagcaattcgctgatag

SEQ ID NO: 1053 - DNA, 225 bp, Unknown
  Encodes 16S rRNA from Clostridium XlVa
agagtttgatcatggctcaggatgaacgctggcggcgtgcctaacacatgcaagtcgaacgggggcgttccgccggggaggcttcggccgaaccatggggcgcccgagtggcggacgggtgagtaacgcgtggacaacctgccccccaccggggaataacacctggaaacaggtgctaataccgcatgagccccagagcccgcatgggcactgggggaaagctcc

SEQ ID NO: 1054 - DNA, 225 bp, Unknown
  Encodes 16S rRNA from Barnesiella
agagtttgatcatggctcaggatgaacgctagcgacaggcctaacacatgcaagtcgaggggcagcgagaggaaagcttgctttctttgtcggcgaccggcgcacgggtgcgtaacgggtgtgcaatctgcccataatcggggcatagcctaacgaaagttggattaattccccatgtgctatggagaggcatctcttcgtagtgaaacgtaaggattatggttg

SEQ ID NO: 1055 - DNA, 225 bp, Unknown
  Encodes 16S rRNA from Clostridium IV
agagtttgatcctggctcaggacgaacgctggcggcgtgcctaacacatgcaagtcgagcggggactttacgacagatttgaagacttcggttgaatatgaagatgtaaagttctagcggcggacgggtgagtaacgcgtgagcaacctgtcccttacagggggataacacagcgaaagttgtactaataccgcatgagaccacagtatcacatggtacaggggt

SEQ ID NO: 1056 - DNA, 225 bp, Unknown
  Encodes 16S rRNA from Prevotella
agagtttgatcatggctcaggatgaacgctagctacaggcttaacacatgcaagtcgaggggcagcatgtcggtggcttgccaccggcgatggcgaccggcgcacgggtgagtaacgcgtatccaacctgcccacaacctccgaatagcccgccgaaaggcggattaatgcgggatgtggtctgaagaagacatctgaactagaccaaaggttttttccggttgt

SEQ ID NO: 1057 - DNA, 225 bp, Unknown
  Encodes 16S rRNA from Clostridium XlVa
agagtttgatcctggctcaggacgaacgctggcggcgtgcttaacacatgcaagtcgaacgaggataatgacttcggtcattattcgagtggcggacgggtgagtaacgcgtgagcaatctgtccttaagagggggataacaactggaaacagttgctaataccgcataagaccacggcttcacatggagctgaggtaaaagaagcaattcgcttaagggtgagc

SEQ ID NO: 1058 - DNA, 225 bp, Unknown
  Encodes 16S rRNA from Butyricimonas
agagtttgatcctggctcaggatgaacgctagcggcaggcttaacacatgcaagtcgaggggcagcgcggggtagcaatactctggcggcgaccggcggaagggtgcgtaacgcgtgagcaacttgcccgtcactgtgggataggcactggaaacggtgtgtaataccacgtaatacatttgctcgcatgggtggatgttgaaaggattaccggtgacggatggg

SEQ ID NO: 1059 - DNA, 225 bp, Unknown
  Encodes 16S rRNA from Blautia
agagtttgatcctggctcaggatgaacgctggcggcgtgcctaacacatgcaagtcgaacggagcttatttctgcggagatttcggtcaaagcgggtttaagtttagtggcggacgggtgagtaacgcgtggagaacctgccctgtaccgggggataacagccggaaacggctgctaataccgcataagcgcacgaaggcgcatgccttagtgtgaaaaactccg

SEQ ID NO: 1060 - DNA, 204 bp, Unknown
  Encodes 16S rRNA from Prevotella
agagtttgatcatggctcaggatgaacgctagctacaggctttggtcaatgggcgcgagcctgaaccagccaagtagcgtgcaggatgacggccctatgggttgtaaactgcttttatgcggggataaagttcactacgtgtagtgttttgtaggtaccgcatgaataaggaccggctaattccgtgccagcagccgcggtaat

SEQ ID NO: 1061 - DNA, 225 bp, Unknown
  Encodes 16S rRNA from Clostridium XlVa
agagtttgatcctggctcaggatgaacgctggcggcgtgcctaacacatgcaagtcgaacggggtacagacgctgtgagaagaagtgcttgcacggaatcaaacttgtttgtacctagtggcggacgggtgagtaacgcgtggaaaacctgcctcatacagggggataacaggaagaaattcctgctaataccgcataagcgcacaagagggcatcctcaggtgt

SEQ ID NO: 1062 - DNA, 225 bp, Unknown
  Encodes 16S rRNA from Blautia
agagtttgatcatggctcaggatgaacgctggcggcgtgcctaacacatgcaagtcgaacgggacttatcaggaaaaaagcttcggcagatggaatggtaagtctagtggcggacgggtgagtaacgcgtggggaacctgccctgtactgggggataacagtgagaaatcactgctaataccgcataagcgcacagtaccgcatggtacagtgtgaaaaactccg

SEQ ID NO: 1063 - DNA, 225 bp, Unknown
  Encodes 16S rRNA from Clostridium IV
agagtttgatcctggctcaggacgaacgctggcggcgcgcctaacacatgcaagtcgaacgggaaatatctgaaagcttgcttttggatatttttagtggcggacgggtgagtaacacgtgagcaacctgccttagagagggggataacgtctggaaacggacgctaataccgcataacatcacgatatggcatcgtattgtgatcaaaggagcaatccgcttta

SEQ ID NO: 1064 - DNA, 225 bp, Unknown
  Encodes 16S rRNA from Flavobacterium
agagtttgatcatggctcaggatgaacgctagcggcaggcttaacacatgcaagtcgaggggcagcatgagagcgtagcaatacattcttgatggcgaccggcgcaagggtgcgtaacgcgtgagcaacttgcccgcatcaggggcataatcggtggaaacgccgtctaactccccataacatacgaggtggcatcactttgtattgaaatccttggaggatgcg

SEQ ID NO: 1065 - DNA, 225 bp, Unknown
  Encodes 16S rRNA from Prevotella
agagtttgatcctggctcaggatgaacgctagctacaggcttaacacatgcaagtcgaggggcagcatgtcgtgtgcttgcacacgatgatggcgaccggcgcacgggtgagtaacgcgtatccaacctgcccatgaccccgggatagcccgctgaaaagcggattaacaccggatgcggtcgaacgaggacatctgatttcgaccaaagcttcggcggtcatgg

SEQ ID NO: 1066 - DNA, 225 bp, Unknown
  Encodes 16S rRNA from Clostridium XlVa
agagtttgatcctggctcaggatgaacgctggcggcgtgcctaacacatgcaagtcgaacggggttgtgcgctgaggaagcttcggcagaatcttgcacaacctagtggcggacgggtgagtaacgcgtggacaacctgcccctgcctgggggacaacagccggaaacggctgctaataccgcataagctctgttattcgcatgggaagcagaggaaaggagaga

SEQ ID NO: 1067 - DNA, 225 bp, Unknown
  Encodes 16S rRNA from Clostridium XlVa
agagtttgatcctggctcaggatgaacgctggcggcgtgcttaacacatgcaagtcgaacgaagcactggggatgaagttttcggacagaattccctttgacttagtggcggacgggtgagtaacgcgtgggtaacctgcctcacactgggggacaacagctggaaacggctgctaataccgcataagcgcacgaagccgcatggctatgtgtgaaaaactccgg

SEQ ID NO: 1068 - DNA, 225 bp, Unknown
  Encodes 16S rRNA from Eubacterium
agagtttgatcctggctcaggatgaacgctggcggcgtgcctaacacatgcaagtcgagcgagaaacttatgtgatgcgatttcggtcaaatcttttaagtggaaagcggcggacgggtgagtaacgcgtaggcaacctgcccttagcagggggatagccattggaaacgatgattaaaaccccataatacggatatatcacatgttaaatccgtcaaagattta

SEQ ID NO: 1069 - DNA, 225 bp, Unknown
  Encodes 16S rRNA from Butyricicoccus
agagtttgatcctggctcaggataaacgctggcggcgtgcataacacattcaagtcgaacggacgatacgagaaacttcggttttttgtaaagttagtggcggacgggtgagtaacacgtgagcaatctgcctttgattgggggataacgcagggaaacttgtgctaataccgcataaagtgccgaggacgcatgaccacggcaccaaagctccggcgatcaaag

SEQ ID NO: 1070 - DNA, 225 bp, Unknown
  Encodes 16S rRNA from Fluviicola
agagtttgatcatggctcaggatgaacgctagcggcaggcttaacacatgcaagtcgaggggtaacaggcggtagcaatactgtgctgacgaccggcgcacgggtgcgtaacgcgtatgcaacctaccttcaacagggggataagcgggagaaattctgtctaataccccatagagtctagagggcacatgttttttagactaaagccttggtggttggagatgg

SEQ ID NO: 1071 - DNA, 225 bp, Unknown
  Encodes 16S rRNA from Anaerovibrio
agagtttgatcatggctcaggacgaacgctggcggcgtgcttaacacatgcaagtcgaacggggcgaagaagagcttgctctttggagcctagtggcaaacgggtgagtaacgcgtaggcaacctgcccttcagatggggacaacacctcgaaaggggtgctaataccgaatgacgtatgctggtcgcatgaccggcataccaaaggccgggcaaccggtcactg

SEQ ID NO: 1072 - DNA, 225 bp, Unknown
  Encodes 16S rRNA from Blautia
agagtttgatcctggctcaggatgaacgctggcggcgtgcctaacacatgcaagtcgaacggatttcctaatgacagaggcttcggccaacgaagtttggaagttagtggcggacgggtgagtaacgcgtggagaacctgccctgtactgggggataacatcaggaaactggtgctaaaaccgcataagcgcacaagaccgcatggtcaagtgtgaaaaactccg

SEQ ID NO: 1073 - DNA, 225 bp, Unknown
  Encodes 16S rRNA from unknown taxa
agagtttgatcctggctcagaacgaacgctggtagcgtggattaggcatgcaagtcgaacgggatccgggaggtagcaatacttcctggtgagagtggcggattggggaggaacacgtgagcaacctgcctttgagtcggggaaaaccgttggaaacgacggctaataccggatgtggcgcccggagacatcttcggagcgctaaagggggccgcaaggctctcg

SEQ ID NO: 1074 - DNA, 225 bp, Unknown
  Encodes 16S rRNA from Clostridium sensu stricto
agagtttgatcctggctcaggacgaacgctggcggcatgcctaacacatgcaagtcgaacggaataagaatggttgtagcgatactttcgttcttatttagtggcgaacgggtgagtaacacgtgagcaacctgccttctactcagggataacagccggaaacggctgctaataccggataagaccacgccgaggcatctcggaggggtcaaagcgccttagcgg

SEQ ID NO: 1075 - DNA, 225 bp, Unknown
  Encodes 16S rRNA from Spirochaeta
agagtttgatcctggctcagaacgaacgctggcggcgcgtcttaagcatgcaagtcgagcggcaagctgccttcgggcagcctagagcggcggactggtgagtaacgcgtggatgacgcaccctcctgatcgggatagcctgtggaaacacagggtaataccggataagcccgcccgcgttggaggcgagcggggaaaggggctattgccccgctggaggagcgg

SEQ ID NO: 1076 - DNA, 225 bp, Unknown
  Encodes 16S rRNA from Clostridium XI
agagtttgatcatggctcaggatgaacgctggcggcgtgcttaacacatgcaagtcgaacggagacatgttttggaagttttcggatggaagagatatgtcttagtggcggacgggtgagtaacacgtaaacaatctgcctttgagagcgggacaacagatagaaatatttgctaataccgcataagaccacaggttcgcatgaactaggggtaaaaggggagca

SEQ ID NO: 1077 - DNA, 225 bp, Unknown
  Encodes 16S rRNA from Anaerovorax
agagtttgatcctggctcaggatgaacgctggcggcgtgcctaacacatgcaagtcgagcgagaaacctctttgaagatacttcggttgattctgtgaggcggaaagcggcggacgggtgagtaacgcgtaggcaacctgccccatgcagagggatagcctcgggaaaccgggattaaaacctcataatacggaagagagacatctctttttcgtcaaagattta

SEQ ID NO: 1078 - DNA, 225 bp, Unknown
  Encodes 16S rRNA from Roseburia
agagtttgatcctggctcaggatgaacgctggcggcgtgcttaacacatgcaagtcgaacgaatttctttcagaacgcggcttcggccaagggacggaagaagtgagtggcggacgggtgagtaacgcgtgggtaacctgcctcacattgggggataccagtcggaaacgactgctaataccgcataagaccccggcaccgcatggtgctgaggccaaaactccg

SEQ ID NO: 1079 - DNA, 225 bp, Unknown
  Encodes 16S rRNA from Mucilaginibacter
agagtttgatcatggctcaggatgaacgctagcggcaggcctaatacatgcaagtcgaacgggatgggccccttcgggggccctgagagtggcgcacgggtgcgcaacgcgtatgcaaccaacccccgacaggcggatagccggtggaaacgccggataatacgccatggttccggtggagggcatcctctactggataaagccgagaggcggtcggggacgggc

SEQ ID NO: 1080 - DNA, 225 bp, Unknown
  Encodes 16S rRNA from Clostridium XI
agagtttgatcctggctcaggatgaacgctggcggcatgcctaacacatgcaagtcgaacggagatagaaatatcttagtggcgaacgggtgagtaacacgtgagcaacctgccttgtacacagggataacagatggaaacatctgctaataccggataagaccacagaccggcatcggtcaggggtaaaagtgatttagcggtacaagatgggctcgcgtccaa

SEQ ID NO: 1081 - DNA, 225 bp, Unknown
  Encodes 16S rRNA from Lachnospiracea incertae sedis
agagtttgatcatggctcaggatgaacgctggcggcgtgcctaacacatgcaagtcgaacgaagctctgctgcggaactcttcggagggaaggagcggatgactgagtggcggacgggtgagtaacgcgtgggtaacctgccctgtacagggggacaacagttagaaatgactgctaataccgcataagcgtacggtgccgcatggcacagtgcgaaaaaccgag

SEQ ID NO: 1082 - DNA, 225 bp, Unknown
  Encodes 16S rRNA from Prevotella
agagtttgatcatggctcaggatgaacgctagctacaggcctaacacatgcaagtcgaggggcagcatggaggttgcttgcaacttccgatggcgaccggcgaatgggtgagtcacgcgtgtccaacctgcctccggcccggggatagcccttggaaatgaggattaagacccgataggtggcgcttccgcatggcggcgccatgaaacgagaccggagatgggg

SEQ ID NO: 1083 - DNA, 225 bp, Unknown
  Encodes 16S rRNA from Clostridium III
agagtttgatcctggctcaggacgaacgctggcggcgtgcctaacacatgcaagtcgaacgagaatttagtaaatgatttcttcggaatgattttgctaaaggaaagtggcggacgggcgagtaacgcgtgagtaacctgcccataagagggggataatccttggaaacgaggactaataccgcatattgtagctttaccgcatggtttagttatgaaagattta

SEQ ID NO: 1084 - DNA, 225 bp, Unknown
  Encodes 16S rRNA from Lachnospiracea incertae sedis
agagtttgatcctggctcaggataaacgctggcggcgtgcttaacacatgcaagtcgaacgaagcattttgccacgatcccttcggggtgacggcattctgacttagtggcggacgggtgagtaacgcgtggacaacctgccgcatgcagggggataacagccggaaacggctgctaataccgcataagcgcacagtgccgcatggcacggtgtgaaaaactttc

SEQ ID NO: 1085 - DNA, 225 bp, Unknown
  Encodes 16S rRNA from Coprococcus
agagtttgatcctggctcaggatgaacgctggcggcgtgcttaacacatgcaagtcgaacggagtttagcgcttccgaagcttcggcagaggattgttaaacttagtggcggacgggtgagtaacgcgtgggtaacctgccatgtacagggggataacacttagaaataggtgctaataccgcataagcgcacaggaccgcatggtccggtgtgaaaaactgagg

SEQ ID NO: 1086 - DNA, 225 bp, Unknown
  Encodes 16S rRNA from Acholeplasma
agagtttgatcctggctcaggatgaacgctggcggcgtgcctaatacatgcaagtcgaacgctaactttcgggttagagtggcgaacgggtgagtaacacgtaggtaacctgcccataagacgaggataactactggaaacggtagctaatactggatagtatatagagtcgcatggctttatatttaaagatgccttcaagcatcacttatggatggacctgcg

SEQ ID NO: 1087 - DNA, 225 bp, Unknown
  Encodes 16S rRNA from Clostridium III
agagtttgatcctggctcaggacgaacgctggcggcgtgcctaacacatgcaagtcgaacgagaatttagcaaatgatttcttcggaatgattttactaaaggaaagtggcggacgggcgagtaacgcgtgagtaacctgcccataagagggggataatccttggaaacggggactaataccgcatatagtaattttaccgcatggtttaattatgaaagattta

SEQ ID NO: 1088 - DNA, 225 bp, Unknown
  Encodes 16S rRNA from Lactobacillus
agagtttgatcctggctcaggatgaacgccggcggtgtgcctaatacatgcaagtcgaacgcgttggcccaactgattgaacgtgcttgcacggacttgacgttggtttaccagcgagtggcggacgggtgagtaacacgtaggtaacctgccccaaagcgggggataacatttggaaacagatgctaataccgcataacaatttgaatcgcatgattcaaattt

SEQ ID NO: 1089 - DNA, 225 bp, Unknown
  Encodes 16S rRNA from Clostridium IV
agagtttgatcatggctcaggacgaacgctggcggcgtgcttaacacatgcaagtcgaacgagaatcagtggaaagagttttcggacgatggaagctgaggaaagtggcggacgggtgagtaacgcgtgaggaacctgccttggagagggggacaacagccggaaacggctgctaataccgcatgacatatctgaatcgcatggtttggatatcaaagaattatc

SEQ ID NO: 1090 - DNA, 225 bp, Unknown
  Encodes 16S rRNA from Prevotella
agagtttgatcatggctcaggatgaacgctagctacaggcttaacacatgcaagtcgaggggcatcgggagggaagcttgctttccttgccggcgaccggcgcacgggtgagtaacgcgtatccaacctgccgcacagtaggggatagcccggagaaatccggattaataccctatgttctccgagtcagtcatctgaattggagcaaaggttcgccgctgtgcg

SEQ ID NO: 1091 - DNA, 225 bp, Unknown
  Encodes 16S rRNA from Bifidobacterium
agagtttgatcatggctcaggatgaacgctggcggcgtgcttaacacatgcaagtcgaacgggatcctgcgggctttgcttgcgggtgagagtggcgaacgggtgagtaatgcgtgaccaacctgccccatgctccggaatagctcctggaaacgggtggtaatgccggatgctcccgcgccccgcatggggtgtggggaaagctttcgtggcatgggatggggt

SEQ ID NO: 1092 - DNA, 225 bp, Unknown
  Encodes 16S rRNA from Adhaeribacter
agagtttgatcctggctcaggatgaacgctggcggcaggcttaatacatgcaagtcgaacggtaaggcccgaggtagcaataccgagggtacacgagtggcgcacgggtgcgtaacgcgtatgtaatctgcccctgaccggaacaaaacagctggaaacggctgctaatattccatggccatcttcccgggcatccgggaggatgtaaagattcattggtcgggg

SEQ ID NO: 1093 - DNA, 225 bp, Unknown
  Encodes 16S rRNA from Hydrogenoanaerobacterium
agagtttgatcatggctcaggagaaacgctggcggcgcacataagacatgcaagtcgaacggaatttagccgaatgtttacatgaggcgaagatttagtggcggacgggtgagtaacacgtgagcaacctaccttggagagggggataacattgagaaatcagtgctaataccgcataaaactaatttattgcatgatagattagtcaaaggagaaatccgctct

SEQ ID NO: 1094 - DNA, 225 bp, Unknown
  Encodes 16S rRNA from Acetivibrio
agagtttgatcctggctcaggacgaacgctggcggcgtgcttaacacatgcaagtcgaacgggacttcagggaacgaggcttcggccaagcgaactgaagtttagtggcggacgggtgagtaacgcgtgagtaacctgcctatcacagggggacaacagttggaaacgactgctaataccgcataacgtattttcggggcatcccggggataccaaaggagcaat

SEQ ID NO: 1095 - DNA, 225 bp, Unknown
  Encodes 16S rRNA from unknown taxa
agagtttgatcctggctcaggatgaacgctggcggcgtgcttcatacatgcaagtcgaacgagaaatggcagcttgctgccatggaaagtggcggacgggtgagtaatacatagggaatctgcccctagccgggggacaacagttggaaacgactgctaataccgcatatgagatagattgaaatatttatcttgaaaactccggtggctagggatgagcctgtg

SEQ ID NO: 1096 - DNA, 225 bp, Unknown
  Encodes 16S rRNA from Flammeovirga
agagtttgatcatggctcaggatgaacgctagcggcaggccttatacatgcaagtcgaggggtaacatggtgtagcaatacattgatgacgaccggcgtatgggtgagtaatacgtacgtaatctacctcatatagaagaataactcctagaaatgggaactaatgcttcatacagttttaaaaggaatcttttaaaatgaaagatttatcgatatgggatgagc

SEQ ID NO: 1097 - DNA, 225 bp, Unknown
  Encodes 16S rRNA from Dethiosulfovibrio
agagtttgatcatggctcaggatgaacgctggcggcgtgcttaacacattcaagtcgaacggagtattatcgggagcttgcttttgataatacttagtggcggacgggtgagtaatacatgagcaacctgcctttaagagggggataacacagagaaatttgtgctaataccgcatagaacactgagatggcatcatcatagtgggaaaggagcaatccgcttaa

SEQ ID NO: 1098 - DNA, 225 bp, Unknown
  Encodes 16S rRNA from Hippea
agagtttgatcctggctcaggacgaacgctggcggcgtgcctaacacatgcaagtcgagcgaattcttacagagtatcgtaagagttagcggcaaacgggtgagtaacacatgggaaacctcccttagaatggggaacatctccgtgaaaacggagctaataccgcataagaccacagtttggcatcaaacaggggtaaaagcagcaatgcgttctaagatggtc

SEQ ID NO: 1099 - DNA, 225 bp, Unknown
  Encodes 16S rRNA from Faecalibacterium
agagtttgatcctggctcaggataaacgctggcggcgcacataagacatgcaagtcgaacggacgaagttagaatctttacgtttttaactaagttagtggcggactggtgagtaacgcgtgaataacctacctattagaggggaataacgaagagaaattttcgctaataccgcataagctgataggaccgcatggtctagtcagaaaaggagtaatccgctaa

SEQ ID NO: 1100 - DNA, 225 bp, Unknown
  Encodes 16S rRNA from Spirochaeta
agagtttgatcatggctcagaacgaacgctggcggcgcgttttaagcatgcaagtcgcagggtaaaattttagcaatagaattgagactggcgaacgggtgagtaacacgtgaaaatctaccttgagatgggggatagccggtagaaatatcgggtaataccgcatatgccgagaggtgaaaggggcaactgctccgtcttgagatgagtttgcgtctgattaga

SEQ ID NO: 1101 - DNA, 225 bp, Unknown
  Encodes 16S rRNA from Brevundimonas
agagtttgatcatggctcagaatgaacgctggcggtatgcttaatacatgcaagtcgaacgagaaagttcagcaatggacgagtaaagtggcgtacgggtgagtaatatataggaatctacccagtaatgaggaataagcactggaaacggtgtctaataccacatactaccatttatttgggaaagggttaatggcaacattaacctgttattggatgagccta

SEQ ID NO: 1102 - DNA, 225 bp, Unknown
  Encodes 16S rRNA from Mucilaginibacter
agagtttgatcatggctcaggatgaacgctagcggcaggcctaatacatgcaagtcgaacgggatgggctccttcgggggccctgagagtggcgcacgggtgcgcaacgcgtatgcaaccaacccccgacaggcggatagccggtggaaacgccggataatacgccatggttccgtgggagggcatcctcctgaggataaagccgagaggcggtcggggacgggc

SEQ ID NO: 1103 - DNA, 225 bp, Unknown
  Encodes 16S rRNA from Hydrogenoanaerobacterium
agagtttgatcatggctcaggacgaacgctggcggcgcgcctaacacatgcaagtcgaacggaactagtgaccggagggtagagggatctatcttgcgatcactagttcagtggcggacgggtgagtaaaacatgagcaacctggctagtagagggggatagcttttggaaacagaagataataccgcatacatcagagatttcgcatgaagtttttggaaaagg

SEQ ID NO: 1104 - DNA, 225 bp, Unknown
  Encodes 16S rRNA from Asaccharobacter
agagtttgatcctggctcaggatgaacgctggcggcgtgcctaacacatgcaagtcgaacggttaacccgccttcgggcggtcataaagtggcgaacgggtgagtaacacgtgaccaacctgccccgcgctccgggacagcctcgcgaaagcgggattaataccggatgcaccgcacctttcgcatgatcggtgcgggaaagctccggcggcgcgggatggggtc

SEQ ID NO: 1105 - DNA, 225 bp, Unknown
  Encodes 16S rRNA from Clostridium IV
agagtttgatcctggctcaggatgaacgctggcggcgtgcataacacattcaagtcgaacgaagcatgtagacggaagttttcggatggaagtatatatgacttagtggcggacgggtgagtaacgcgtgagcaaccttcctgcctgtgagggataacacagggaaacttgtgctaataccgcatgacgcacagacatcgcatggtgagtgtgccaaagatttat

SEQ ID NO: 1106 - DNA, 225 bp, Unknown
  Encodes 16S rRNA from Mogibacterium
agagtttgatcatggctcaggatgaacgctggcggcgtgcctaatacatgcaagtcgagcgagaagccaatttgaagcgttttcggacaattctgtttggtggaaagcggcggacgggtgagtaacgcgtaggcaacctgcccttagcagagggatagccattggaaacgatgattaaaacctcataatgccggttttacacatgttggaccggccaaagattta

SEQ ID NO: 1107 - DNA, 225 bp, Unknown
  Encodes 16S rRNA from Clostridium IV
agagtttgatcctggctcaggacgaacgctggcggcgtgcctaacacatgcaagtcgaacggagttattagagtgaagttttcggatggagcgaagataacttagtggcggacgggtgagtaacgcgtgagtaacctgcccattagagggggataacgttctgaaaagaacgctaataccgcataatatatttagttcgcatgaactgaatatcaaaggagcaat

SEQ ID NO: 1108 - DNA, 225 bp, Unknown
  Encodes 16S rRNA from Oscillibacter
agagtttgatcatggctcaggacgaacgctggcggcgtgcctaacacatgcaagtcgaacgaagctccggaagggcgacttcggtcaaacggaaggaagacttagtggcgaacgggtgagtaacgcgtgaggaacctgcctttcagtgggggacaacagttggaaacgactgctaataccgcataacgtacggaggtcgcatgaccattgtaccaaagatttatt

SEQ ID NO: 1109 - DNA, 225 bp, Unknown
  Encodes 16S rRNA from Clostridium XlVa
agagtttgatcatggctcaggatgaacgctggcggcgtgcctaacacatgcaagtcgagcggagagacagcggagattcaatcgatgatctgcttcttcttagcggcggatgggtgagtaacacgtgggtaacctgccctgcactgggggataacagttggaaacgactgttaataccgcatatgcgcacgggaccgcatggtcctgggcggaaagatttatcgg

SEQ ID NO: 1110 - DNA, 225 bp, Unknown
  Encodes 16S rRNA from Faecalibacterium
agagtttgatcctggctcaggacgaacgctggcggcatgcctaacacatgcaagtcgaacggtctaagagataaatttttaatttatttcaaggatagtggcgaacgggtgagtaacgcgtgagcaacctaccttttagagggggataacgcttggaaacaggcgctaataccgcataagctccgagtattgagtgatacaaggagaaaaggaggaatccgctaa

SEQ ID NO: 1111 - DNA, 225 bp, Unknown
  Encodes 16S rRNA from Altererythrobacter
agagtttgatcctggctcagaacgaacgctggcggcatgcttaacacatgcaagtcgaacggtgttttctagtacttgtattaggaaacatagtggcaaacgggtgagtaacgcgtgggaatgtacccttaagtattggataacgtctggaaacggacgctaatacaatatacgctcgagagaggaaagagagatcgctgaaggagtagcccgcgttagattagg

SEQ ID NO: 1112 - DNA, 225 bp, Unknown
  Encodes 16S rRNA from Gelidibacter
agagtttgatcctggctcaggataaacgctagcggcaggcctaacacatgcaagtcgagcggtaacgggagtagcaatacttgccgacgagcggcggacgggtgagtaacgcgtatgcaacctaccctttattcagggatagccttccgaaaggaggattaatacctgatggttcatttgagaggcatcttgataatgataaagatttattgataaaggatgggc

SEQ ID NO: 1113 - DNA, 225 bp, Unknown
  Encodes 16S rRNA from Prevotella
agagtttgatcatggctcaggatgaacgctagctacaggcttaacacatgcaagtcgaggggcatcacgggattggtttcggccattcctggtggcgaccggcgcacgggtgagtaacgcgtatccaacctgcccgcaaccgcggaatagcccgccgaaaggcggattaatgccgcatgcgctcgcgcgctggcatctgatcgcgagcaaaggtttttccggttg

SEQ ID NO: 1114 - DNA, 225 bp, Unknown
  Encodes 16S rRNA from Anaerovorax
agagtttgatcatggctcaggatgaacgctggcggcgtgcctaacacatgcaagtcgagcgagaatctttgaagtagcttgctacggagaagaggacagcggcggacgggtgagtaacgcgtaggtaagctgccccttgcagaaggatagcctcgggaaactgggattaatacttcataaagcgttttcatcgcatggtgagaacgccaaagatctatcggcaag

SEQ ID NO: 1115 - DNA, 225 bp, Unknown
  Encodes 16S rRNA from Riemerella
agagtttgatcatggctcaggatgaacgctagcgggaggcctaacacatgcaagccgagcggtagaaagtagcttgctacttttgagagcggcgtacgggtgcggaacacgtgtgcaacctgcctttatctggggaatagcctttcgaaaggaagattaatgccccataacatattgattggcatcaattaatattgaaagctccggcggatagagatgggcacg

SEQ ID NO: 1116 - DNA, 225 bp, Unknown
  Encodes 16S rRNA from Sphingobacterium
agagtttgatcatggctcaggatgaacgctagcggcaggcctaatacatgcaagtcgaacgggatctactggtaagcttgcttattggtagtgagagtggcgcacgggtgcgtaacgcgtgagcaacctacccttgtcagggggatagcccggcgaaagtcggattaataccgcatgacatcattgagaggcatctttcggtgatcaaagatttatcggacaagg

SEQ ID NO: 1117 - DNA, 225 bp, Unknown
  Encodes 16S rRNA from Syntrophococcus
agagtttgatcatggctcaggatgaacgctggcggcgtgcctaacacatgcaagtcgaacgaggctctgatccccgatgattcgtctgaagggaaaggatgtccgagtggcggatgggtgagtaacgcgtggagaacctgccccctgctgggggataacaactggaaacggttgacaataccgcataagcgcttttgatcgcatgatctgaagcggaaagattta

SEQ ID NO: 1118 - DNA, 225 bp, Unknown
  Encodes 16S rRNA from Bacteroides
agagtttgatcatggctcaggatgaacgctagctacaggcttaacacatgcaagtcgaggggcatcgcggtgtagcaatacactggcggcgaccggcgcacgggtgagtaacacgtatccaacctgccttcagctcggggatagccctctgaaaggaggattaatacccgatgtggtttttcgcagacatctgcgtataattaaagatttatcggctgatgatgg

SEQ ID NO: 1119 - DNA, 225 bp, Unknown
  Encodes 16S rRNA from Papillibacter
agagtttgatcctggctcaggatgaacgctggcggcgtgcataacacattcaagtcgaacgaagcactttggcggaaccttcgggggaagctgatttgacttagtggcggacgggtgagtaacgcgtgagcaaccttcctgcttgtgagggataacacagggaaacttgtgctaataccgcatgacgcatagacatcgcatggtgactatgccaaagacatgttg

SEQ ID NO: 1120 - DNA, 225 bp, Unknown
  Encodes 16S rRNA from Butyricicoccus
agagtttgatcctggctcaggatgaacgctggcggcgtgcataacacattcaagtcgaacgggacttagagggcttgccctttaagtttagtggcggacgggtgagtaacgcgtgagtaacctacctacatgagagggataacacagggaaacttgtgctaataccacataacatactgaattcgcatgtatttagtatcaaagagcaatcgcatatagatggac

SEQ ID NO: 1121 - DNA, 225 bp, Unknown
  Encodes 16S rRNA from Clostridium IV
agagtttgatcatggctcaggatgaacgctggcggcgtgcctaacacatgcaagtcgaacggactgatttccttcgggaatgaaagttagtggcggacgggtgagtaacgcgtgaggaacctgccttacagagggggataacgataagaaattgtcgctaataccgcataacacctcacacccgcatgggtgaggggtcaaaggagcaatccgctgtaagatggc

SEQ ID NO: 1122 - DNA, 225 bp, Unknown
  Encodes 16S rRNA from Hydrogenoanaerobacterium
agagtttgatcatggctcaggacgaacgctggcggtatgcctaacacatgcaagtcgaacgggtgtgtaaagagcttgctctttatttcactagtggcggacgggtgagtaacgcgtgagtaatctgccttgaagtggggaataacatttggaaacaaatgctaataccgcgtaatatactttcttcgcatgaagtttgtatcatagtttttcgcttcaagatga

SEQ ID NO: 1123 - DNA, 225 bp, Unknown
  Encodes 16S rRNA from Marvinbryantia
agagtttgatcatggctcaggatgaacgctggcggcgtgcctaacacatgcaagtcgaacgaagaccccgaagcggagatttcggttgaagctaagggaggactgagtggcggacgggtgagtaacgcgtggataacctgccccatacagggggatagcagttggaaacgactgataataccgcataagcgcacgaggagacatctccctgtgtgaaaagaatta

SEQ ID NO: 1124 - DNA, 225 bp, Unknown
  Encodes 16S rRNA from Brevibacillus
agagtttgatcatggctcaggatgaacgctggcggcgtgcctaatacatgcaagtcgaacggagaggcctcgacggaaaggtgcttgcaccttgaagatgaggaatcttagtggcgaacgggtgagtaatacatgagcaacctacccctttgactgggataacattctgaaaaggatgctaataccggataattaatattgaggcatctcgatattattaaaggt

SEQ ID NO: 1125 - DNA, 225 bp, Unknown
  Encodes 16S rRNA from Clostridium IV
agagtttgatcctggctcaggataaacgctggcggcgtgcataacacattcaagtcgaacgaagcactttttcttgagacttcggtcaagagaggatttgacttagtggcggacgggtgagtaacgcgtgagcaacctgcctaccggtgcgggataacgtttggaaacggacgctaataccgcataacgcatagatatcgcatggtatttgtgccaaagattcat

SEQ ID NO: 1126 - DNA, 225 bp, Unknown
  Encodes 16S rRNA from Prevotella
agagtttgatcatggctcaggatgaacgctagcggcaggcttaacacatgcaagtcgaggggcatcgcggggtagcaatactctggcggcgaccggcgaaagggtgagtaacgcgtgagcaacatgcccttgggtgggggatagtcattggaaacgatgcgtaataccccgtacgacgagagaccgcatgatttttcgttaatagatttattgcccaaggattgg

SEQ ID NO: 1127 - DNA, 225 bp, Unknown
  Encodes 16S rRNA from Clostridium IV
agagtttgatcatggctcaggatgaacgctggcggcgtgcctaacacatgcaagtcgaacggaacttgagggcttgcccttaagtttagtggcggacgggtgagtaacgcgtgagtaacctgcctttgagaggggaataacttcccgaaagggatgctaataccgcataacacatagctgtcgcatggcagagatgtcaaagattttatcgctcaaagatggact

SEQ ID NO: 1128 - DNA, 225 bp, Unknown
  Encodes 16S rRNA from Aminobacter
agagtttgatcctggctcagaacgaacgctggcggcaggcttaacacatgcaagtcgagcgccccgcaaggggagcggcagacgggtgagtaacgcgtgggaatctaccttttgctacggaataactcagggaaacttgtgctaataccgtatgtgtccttcgggagaaagatttatcggcaagagatgagcccgcgttggattagctagttggtggggtaaagg

SEQ ID NO: 1129 - DNA, 225 bp, Unknown
  Encodes 16S rRNA from Sporotomaculum
agagtttgatcatggctcaggacgaacgctggcggcgtgcttaacacatgcaagtcgaacgggcgacccttctacggaaggggagctagtggcggacgggtgagtaacgcgtgagcaaccaacccataagagggggataacaacgggaaaccgttgctaataccgcataagaccaagacagcgcatgctgaaggggtcaaaggagtaatccgcttatggacgggc

SEQ ID NO: 1130 - DNA, 225 bp, Unknown
  Encodes 16S rRNA from Clostridium IV
agagtttgatcatggctcaggacgaacgctggcggcgcgcctaacacatgcaagtcgaacggagagcgtgttttgaattcttcggaaggaaagatacgtttcttagtggcggacgggtgagtaacacgtgagcaacctgccttgcagagagggataacgattggaaacgatcgctaataccacataacatatggatatcgcatggtgaccatatcaaagatttat

SEQ ID NO: 1131 - DNA, 225 bp, Unknown
  Encodes 16S rRNA from Pedobacter
agagtttgatcctggctcaggatgaacgctagcggcaggcctaacacatgcaagtcgaggggcagcgcggggtagcaataccctggcggcgaccggcggatgggtgcgtaacgcgtatgcaacctgcctcggacaggaggataaccctgggaagctgggactaatactccgtatgacgagacctcgcatggggtcttgttgaaagccttggtggtccgagatggg

SEQ ID NO: 1132 - DNA, 225 bp, Unknown
  Encodes 16S rRNA from Victivallis
agagtttgatcatggctcagaatgaacgctggcggcatggattaggcatgcaagtcgaacggggcgcagcgatgcgcccagtggcgaaagggtgagtagcacgtgaagaacctgcccccggatccggaacaagcgctggaaacggcgtctgatacgggatgtggacgcggcccgcatgggccgcgctctaaagattcatcgtccggggagggcttcgcgtcccat

SEQ ID NO: 1133 - DNA, 225 bp, Unknown
  Encodes 16S rRNA from Gelidibacter
agagtttgatcatggctcaggataaacgctagcggcaggcctaacacatgcaagtcgagcggtaacgggagtagcaatacttgccgacgagcggcggacgggtgagtaacgcgtatgcaacctaccctttattcagggatagccttccgaaaggaggattaatacctgatagtactcaatgagggcatccaaagtgagttaaagatttattgataaaggatgggc

SEQ ID NO: 1134 - DNA, 225 bp, Unknown
  Encodes 16S rRNA from Prevotella
agagtttgatcatggctcaggatgaacgctagctacaggcttaacacatgcaagtcgaggggcagcatggctgttgcttgcaacagccgatggcgaccggcgcacgggtgagtaacgcgtatccaacctgccccataccgcggcacagcccggagaaatccggattaactccgcatgcggtcctttgatggcatcagtttaggaccaaacgttcagggtatggga

SEQ ID NO: 1135 - DNA, 225 bp, Unknown
  Encodes 16S rRNA from Wautersiella
agagtttgatcctggctcaggatgaacgctagcgggaggcttaacacatgcaagccgaggggtagagatagcttgctattttgagaccggcgcacgggtgcgtaacgcgtatgcaacttgccctattgaaagggatagcccagagaaatttggattaataccttataataaatttcattgcatgatgagattttgaaagatttatcgcagtaggataggcatgcg

SEQ ID NO: 1136 - DNA, 225 bp, Unknown
  Encodes 16S rRNA from Slackia
agagtttgatcctggctcaggatgaacgctggcggcgtgcctaacacatgcaagtcgaacggttaaaccggcttttagccggacataaagtggcgaacgggtgagtaacacgtgaccaacctgccccccgcaccgggacaacgggcggaaacgcccgctaataccggatactccgggcgccggcgcatgccggccccgggaaagcccaggcggcgggggatgggg

SEQ ID NO: 1137 - DNA, 225 bp, Unknown
  Encodes 16S rRNA from Pyramidobacter
agagtttgatcctggctcaggacgaacgctggcggcgtgcttaacacatgcaagttgggcgaggatggtttgaggagacatatgttgaattgaatcgttcgagcagcggacgggtgagtaaagcacaaggacttgtccgaaagagagggacaccttcgggaaaccggagctaatacctcataagccggaaggtgaaaagcagagatgcgcttttggagagacttg

SEQ ID NO: 1138 - DNA, 225 bp, Unknown
  Encodes 16S rRNA from Lachnospiracea incertae sedis
agagtttgatcatggctcaggatgaacgctggcggcgtgcttaacacatgcaagtcgaacggactttgctcgctgaaaaaggaaggtgcttgcacctgagagtttcttgaggaaagttagtggcggacgggtgagtaacgcgtgggtaacctgcctatcacagggggataacagttggaaacgactgctaataccgcataagcgcacggtatcgcatgatacagt

SEQ ID NO: 1139 - DNA, 225 bp, Unknown
  Encodes 16S rRNA from Clostridium XlVa
agagtttgatcctggctcaggatgaacgctggcggcgtgcttaacacatgcaagtcgaacggggtacagacgctgaagagtggagtgcttgcacaaagcgattcttgtttgtacctagtggcggacgggtgagtaacgcgtgggtaacctgccatacacagggggacaacagttggaaacgactgctaataccgcatatgcacacagtgaggcatctcacagggt

SEQ ID NO: 1140 - DNA, 225 bp, Unknown
  Encodes 16S rRNA from Prevotella
agagtttgatcatggctcaggatgaacgctagctacaggcttaacacatgcaagtcggggggcagcacgggaagcagcaatgcttttgggtggcgaccggcgaatgggtgagtaacgagtatccaacctgccccgtgctccgggacagccccgcgaaagcgggattaataccggatggtgcgtatgttccgcatgggatatacgtcaaagattcatcggcacggg

SEQ ID NO: 1141 - DNA, 225 bp, Unknown
  Encodes 16S rRNA from Lentisphaera
agagtttgatcctggctcagaatgaacgctggcggcatggattaggcatgcaagtcgaacgccccgggcttgcccggggagtggcgaaagggtgcgcaacgcgtggggaacccgcccccgggcccgggacaagcgctggaaacggcgtctgatacgggatgtcgagccgggccgcatggcccggcgtcgaaagattcatcgcccggggagggccccgcgtcccat

SEQ ID NO: 1142 - DNA, 225 bp, Unknown
  Encodes 16S rRNA from Desulfoluna
agagtttgatcatggctcagaatgaacgctggcggcgtgcctcaggcatgcaagtcgaacgagaaagttccttcggggatgagtatagtggcgcacgggtgagtaatacttaggtaacgtaccttttcgctggggatagctaggggaaactttagataataccgaatatatccatttttactgcggtttaaatggagaaagccgtaaggcgcgaagagagcggcc

SEQ ID NO: 1143 - DNA, 225 bp, Unknown
  Encodes 16S rRNA from Clostridium III
agagtttgatcctggctcaggacgaacgctggcggcgtgcttcatacatgcaagtcgaacgagaatctctggcttgccagagaggaaagtggcggacgggtgagtaatatgtagagaatctgccctagagagtgggacaacagagggaaacttctgctaataccgcatatgcgcgtagctgagatgctattcgtgaaaactccggtgctctgggatgagtctgca

SEQ ID NO: 1144 - DNA, 225 bp, Unknown
  Encodes 16S rRNA from Clostridium sensu stricto
agagtttgatcatggctcaggacgaacgctggcggcgcgcctaacacatgcaagtcgaacgggactagtgactggagctaagaagttttcttggttgcattcactagttcagtggcggacgggtgagtaaagcatgagtaacttgcccattagtggggaatagcttttggaaacagaagataataccgcatacatcggtttggacacatgttcggaccggaaaag

SEQ ID NO: 1145 - DNA, 225 bp, Unknown
  Encodes 16S rRNA from Prevotella
agagtttgatcctggctcaggatgaacgctagctacaggcttaacacatgcaagtcgaggggcagcacggggactgcttgcagttcccggtggcgaccggcgcacgggtgagtaacgcgtatccaacctgcccgcaactgcggaatagcccgccgaaaggcggattaatgccgcatgagctcgcgcgagggcatcatttcgcgagcaaaggttcattccggttgc

SEQ ID NO: 1146 - DNA, 225 bp, Unknown
  Encodes 16S rRNA from Clostridium III
agagtttgatcatggctcaggacgaacgctggcggcgtgcctaacacatgcaagtcgaacggagttattgcgattgatcccttcggggtgacgttgttctaacttagtggcggacgggcgagtaacgcgtgaataacctgcccataagaggggaataatccatggaaacgtggactaataccgcatattgtaattttatcgcatggtttaattatgaaagattta

SEQ ID NO: 1147 - DNA, 225 bp, Unknown
  Encodes 16S rRNA from Clostridium IV
agagtttgatcatggctcaggatgaacgctggcggcgtgcataacacattcaagtcgaacgaagcactgacgatgaagtcttcggatggaattgtctttgacttagtggcggacgggtgagtaacgcgtgagcaaccttcctggcagtgagggataacacagggaaacttgtgctaataccgcatgacgcacgggaatcgcatggttttagtgccaaagatttat

SEQ ID NO: 1148 - DNA, 225 bp, Unknown
  Encodes 16S rRNA from Prevotella
agagtttgatcatggctcaggatgaacgctagctacaggcctaacacatgcaagtcgaggggcagcatgagggtagctcgctacctttgatggcgaccggcgaatgggtgagtcacgcgtgtccaacctgcctccggcccggggatagcccttggaaatgaggattaagacccgataggtggcgcttccgcatggcggcgccatgaaactggaccggagatgggg

SEQ ID NO: 1149 - DNA, 225 bp, Unknown
  Encodes 16S rRNA from unknown taxa
agagtttgatcctggctcaggacaaacgctggcggcgtgcctaatacatgcaagtcgaacgagaatcaggagcttgctcctgaggaaagtggcggacgggtgagtaatatgtaggaaatctgcccttaggagggggacaacagttggaaacgactgctaataccccatatgagcgtagctgaaatgctattcttgaaatgatttttcgcctaaggatgagcctgc

SEQ ID NO: 1150 - DNA, 225 bp, Unknown
  Encodes 16S rRNA from Helicobacter
agagtttgatcatggctcagagttaacgctggcggcgtgcctaacacatgcaagtcgagcgaattcttacagagtatcgtaagagttagcggcaaacgggtgagtaacacatgggaaaccttccttagaaaggggaacacctccgtgaaaacggagttaataccgcataagaccacagtttggcatcgaacaggggtaaaagcagcaatgcgttctaagatggtc

SEQ ID NO: 1151 - DNA, 225 bp, Unknown
  Encodes 16S rRNA from Clostridium XlVa
agagtttgatcctggctcaggatgaacgctggcggcgtgcttaacacatgcaagtcgaacggagataagctctgatgaagcttcggcagaatcttgcttatcttagtggcggacgggtgagtaacgcgtgggtaacctacctgcaacagggggataacgattggaaacgatcgctaataccgcataacccgctagagtcgcatgactcagacggaaaagatttat

SEQ ID NO: 1152 - DNA, 225 bp, Unknown
  Encodes 16S rRNA from Coprococcus
agagtttgatcctggctcaggatgaacgctggcggcgtgcttaacacatgcaagtcgaacggagtttagcgcttccaaagcttcggcagaggattgttaaacttagtggcggacgggtgagtaacgcgtgggtaacctgccatatacagggggataacacttagaaataggtgctaataccgcataagcgcacggcatcgcatgatgccgtgtgaaaaactccgg

SEQ ID NO: 1153 - DNA, 225 bp, Unknown
  Encodes 16S rRNA from Bradyrhizobium
agagtttgatcatggctcagaacgaacgctggcggcacgcctaacacatgcaagtcggacggtatggatagcttgctattcatatagtggcggactggtgagtaatatgtaggaatctgcccataggttagggatagcaccgggaaactggtggtaatacctgatatcctggagacaggaaaggagcaattcgccgatggaggagcctatatctgattagatagt

SEQ ID NO: 1154 - DNA, 225 bp, Unknown
  Encodes 16S rRNA from Clostridium IV
agagtttgatcctggctcaggacgaacgctggcggcgtgcctaacacatgcaagtcgagcggacttataaatagaaggtgcttgcactggaaatttacaagttagcggcggacgggtgagtaacgcgtgagcaacctgtcctctacagggggataagatttcgaaagggattctaataccgcatgagaccacagcagggcatcctgcgggggtcaaaggaggaat

SEQ ID NO: 1155 - DNA, 225 bp, Unknown
  Encodes 16S rRNA from Sphingobacterium
agagtttgatcatggctcaggatgaacgctagcggcaggcctaatacatgcaagtcggacgggatccattgatagcttgctatccatggtgagagtggcgcacgggtgcgtaacgcgtgagcaacctacctccatcagggggatagcctctcgaaagagagattaacaccgcataacataatgttccggcatcgggatattattaaatatttataggatggagat

SEQ ID NO: 1156 - DNA, 225 bp, Unknown
  Encodes 16S rRNA from Gelidibacter
agagtttgatcatggctcaggataaacgctagcggcaggcctaacacatgcaagtcgagcggcatcgggagtggcaacacttgccggcgagcggcggacgggtgagtaacgcgtatgcaacctgcccaccacacggagatagccgaccgaaaggacgattaaactccgatggcaccttctgggggcatccccgaaaggttaaatattcataggtggtggatgggc

SEQ ID NO: 1157 - DNA, 225 bp, Unknown
  Encodes 16S rRNA from Vasilyevaea
agagtttgatcatggctcagaacgaacgctggcggcaggcttaacacatgcaagtcgaacgccccgcaaggggagtggcagacgggtgagtaacgcgtgggaatctacccagttctacggaacaactgagggaaacttcagctaataccgtatacgccctacgggggaaagatttatcggaattggatgagcccgcgttggattagctagttggtggggtaatgg

SEQ ID NO: 1158 - DNA, 225 bp, Unknown
  Encodes 16S rRNA from Eubacterium
agagtttgatcatggctcaggacgaacgctggcggcgtgcttaacacatgcaagtcgaacgaagcttgattaatgaattcttcggaatgatttatgatatgactgagtggcggacgggtgagtaacgcgtgagtaacctgcctcttggagggggatagtgtttggaaacgaacagtaataccgcataacgtgcattgatggcatcatcgatgtaccaaagattta

SEQ ID NO: 1159 - DNA, 225 bp, Unknown
  Encodes 16S rRNA from Clostridium XlVa
agagtttgatcatggctcaggatgaacgctggcggcgtgcttaatacatgcaagtcgaacgagcagagatattcgtatcaaagcgagtggcggacgggtgagtaacgcgtgggaaacctgccctataccgggggataacagttggaaacgactgctaataccgcataagcgcacgatgtcgcatgacattgtgcgaaaaactccggtggtataggatggtcccgc

SEQ ID NO: 1160 - DNA, 225 bp, Unknown
  Encodes 16S rRNA from Eubacterium
agagtttgatcctggctcaggacgaacgctggcggcgtgcttaacacatgcaagtcgaacgaagcttgaagatagatttcttcggaatgacatctgatatgactgagtggcggacgggtgagtaacgcgtgagcaacctgcccttcggagggggatagcgtttggaaacgaacggtaataccgcataatgttaacggaaggcatcttctgttaaccaaaactccg

SEQ ID NO: 1161 - DNA, 225 bp, Unknown
  Encodes 16S rRNA from Syntrophococcus
agagtttgatcatggctcaggatgaacgctggcggcgtgcctaacacatgcaagtcgaacgggaactccgatctgaaggttcgctggatgattggaaattctagtggcggacgggtgagtaacgcgtgggtaacctgccctttagagggagataacagagagaaatttctgataatatcccatatgcttacagcttcgcatgaagcagtgaggaaagaatttcgc

SEQ ID NO: 1162 - DNA, 225 bp, Unknown
  Encodes 16S rRNA from Prevotella
agagtttgatcatggctcaggatgaacgctagctacaggcttaacacatgcaagtcgaggggcagcatgtaggttgcttgcaacctatgatggcgaccggcgcacgggtgcgtaacgcgtatccaaccttccccgcagtagggtgcagcccgttgaaagacggattaatcccctatgttgtccattgacggcatccgatttggacgaaaggtttcaccgctgcgg

SEQ ID NO: 1163 - DNA, 225 bp, Unknown
  Encodes 16S rRNA from Treponema
agagtttgatcctggctcagaacgaacgctggcggcgcgtcttaagcatgcaagtcggacggcaagattggtgcttgcactgatcctagagtggcggactggtgagtaacgcgtgggtgacgtaccctccggacggggatagctactagaaatagtagataataccggatacggtgcactgtgtcagaggcagtgcaggaaaggttcttttgaaccgccggggga

SEQ ID NO: 1164 - DNA, 225 bp, Unknown
  Encodes 16S rRNA from Anaerovorax
agagtttgatcatggctcaggatgaacgctggcggcgtgcctaacacatgcaagtcgagcgagaagctttccagaagatacttcggttgattcagggaagtggaaagcggcggacgggtgagtaacgcgtaggcaacctgccccttgcagagggatagcctcgggaaaccgggattaaaacctcataatgcggtgagaagacatcttcatatcgccaaagattta

SEQ ID NO: 1165 - DNA, 225 bp, Unknown
  Encodes 16S rRNA from Erysipelotrichaceae incertae sedis
agagtttgatcctggctcaggatgaacgctggcggcatgcctaatacatgcaagtcgaacggagcctttcggggctcagtggcgaacgggtgagtaacacgtaggtaacctgcccatgtgcccgggacaacagctggaaacggctgctaaaaccggataggtatcgaggaggcatctcctggatattaaaggggctttcgggccctgaacatggatggacctgcg

SEQ ID NO: 1166 - DNA, 225 bp, Unknown
  Encodes 16S rRNA from Sulfurovum
agagtttgatcatggctcagagtgaacgctggcggcgtgcttaacacatgcaagtcgaacgagaacggtccttcgggatgtcagctaagtggcggacgggtgagtaatgtatagttaatctgccctttagagggggataacagttggaaacgactgctaataccccatactccttttaccttaatggtaattgggaaacgttttttcgctaaaggatgagactat

SEQ ID NO: 1167 - DNA, 225 bp, Unknown
  Encodes 16S rRNA from Clostridium IV
agagtttgatcatggctcaggagaaacgctggcggcgcacataagacatgcaagtcgaacggaatttagccaaatgtttacatgaggcgaaaatttagtggcggacgggtgagtaacacgtgagcaacctgcctttaagagggggataacattgagaaatcagtgctaataccgcataaagcatatccaccgcatgatggatataagccaaaggagaaatccgct

SEQ ID NO: 1168 - DNA, 225 bp, Unknown
  Encodes 16S rRNA from Papillibacter
agagtttgatcatggctcaggatgaacgctggcggcgtgcataacacattcaagtcgaacgaagcactttggttggagacttcggtcaaagaccgatttgacttagtggcggacgggtgagtaacgcgtgagcaacctgccttgaagagggggataacacagggaaacttgtgctaataccgcataacgtacgtggatcgcatggttcgtgtaccaaagccttta

SEQ ID NO: 1169 - DNA, 225 bp, Unknown
  Encodes 16S rRNA from Paracoccus
agagtttgatcatggctcagaacgaacgctggcggcaggcctaacacatgcaagtcgagcgcaccttcgggtgagcggcggacgggtgagtaacgcgtgggaatatgcccttctctacggaatagtctcgggaaactgggggtaataccgtatacgccctacgggggaaagatttatcggagaaggattagcccgcgttggattaggtagttggtggggtaacgg

SEQ ID NO: 1170 - DNA, 225 bp, Unknown
  Encodes 16S rRNA from Hydrogenoanaerobacterium
agagtttgatcatggctcaggacgaacgctggcggcgcgcctaacacatgcaagtcgaacggaactagtgaccggagggtagaaaacttctatcttgcgatcactagttcagtggcggacgggtgagtaaaacatgagcaacctggctagtagagggggatagcttttggaaacagaagataataccgcatacatcagagatttcgcatgaagtttttggaaaag

SEQ ID NO: 1171 - DNA, 225 bp, Unknown
  Encodes 16S rRNA from Adhaeribacter
agagtttgatcatggctcaggatgaacgctggcggcaggcttaatacatgcaagtcgaacggtaacgaccggtagcaatactggggcgacgagtggcgcacgggtgcgtaacgcgtatgcaacctaccctcaaccggggcataacgccgagaaattggcgctaatatcccatgtgtatatggagtggcatctctccatatataaagatccgttggttaaggatgg

SEQ ID NO: 1172 - DNA, 225 bp, Unknown
  Encodes 16S rRNA from Lachnospiracea incertae sedis
agagtttgatcatggctcaggatgaacgctggcggcgcgcttaacacatgcaagtcgaacgagatgagtgacttcggtcatgagtctagtggcggacgggtgagtaacgcgtggacaacttgccttatagtgggggatagccgaaagaaatttcgattaataccgcataatacaatttgatcgcatgattggattgggaaaggcttcggtcgctaaaagaaaggt

SEQ ID NO: 1173 - DNA, 225 bp, Unknown
  Encodes 16S rRNA from Bacteroides
agagtttgatcatggctcaggatgaacgctagctacaggcttaacacatgcaagtcgaggggcagcatgggggaggtttcggccacccccgatggcgaccggcgaatgggtgagtaacgcgtatccaacctgcccctgtcccggggacagcccttagaaatgaggattaacccccgatggcgcggattagccgcatggcttttccgccaaatgcgaaggacaggg

SEQ ID NO: 1174 - DNA, 225 bp, Unknown
  Encodes 16S rRNA from Hydrogenoanaerobacterium
agagtttgatcatggctcaggagaaacgctggcggcgcacataagacatgcaagtcgaacggaacttaaattgatgtttacattagcttaagtttagtggcggactggtgagtaacacgtgagcaacctgccctttagaggggaataacattgagaaatcagtgctaataccgcataaagcaacattatcgcatgatgaagttgccaaaggagaaatccgctgaa

SEQ ID NO: 1175 - DNA, 225 bp, Unknown
  Encodes 16S rRNA from Telmatospirillum
agagtttgatcatggctcagaacgaacgctggcggcatgcttaacacatgcaagtcgaacggtgttgttcagtacttgtattgagcaacatagtggcaaacgggtgagtaacgcgtgggaacgtacccaacagtattggataacgtttggaaacgaacgctaatacaatatacgcttgagagaggaaagagagatcgctgatggagcggcccgcgttagattagg

SEQ ID NO: 1176 - DNA, 225 bp, Unknown
  Encodes 16S rRNA from Clostridium XlVa
agagtttgatcatggctcaggatgaacgctggcggcgtgcctaacacatgcaagtcgaacgaagcacttctcccgttgaagcctattagcttgctatgaagcggaaacaattgaagtgacttagtggcggacgggtgagtaacgcgtgggtaacctgccctgtacagggggacaacagctagaaatggctgctaataccgcataagcgcacagcatcgcatggtg

SEQ ID NO: 1177 - DNA, 225 bp, Unknown
  Encodes 16S rRNA from Hydrogenoanaerobacterium
agagtttgatcatggctcaggacgaacgctggcggcacgcttaacacatgcaagtcgaacggaacttgggagcttgctttcaagtttagtggcggacgggtgagtaacacgtgagcaacctgcctttcggcggggaataatgattggaaacgatcactaataccccataaaacagagataccgcatggtaattctgtcaaagattcatcaccgaaagatgggctc

SEQ ID NO: 1178 - DNA, 225 bp, Unknown
  Encodes 16S rRNA from Clostridium IV
agagtttgatcatggctcaggatgaacgctggcggcgtgcataacacattcaagtcgaacgaagcactgacgaggaagtcttcggatggaattgtctttgacttagtggcggacgggtgagtaacgcgtgagcaaccttcctggcagtgagggataacacagggaaacttgtgctaataccgcatgacgcactgagatcgcatggttttagtgccaaagattcat

SEQ ID NO: 1179 - DNA, 225 bp, Unknown
  Encodes 16S rRNA from Vasilyevaea
agagtttgatcctggctcagaacgaacgctggcggcaggcttaacacatgcaagtcgaacgccccgcaaggggagtggcagacgggtgagtaacgcgtgggaatctacccagttctacggaataacccagggaaacttggactaataccgtatacgccctacgggggaaagatttatcggaattggatgagcccgcgttggattagctagttggtggggtaatgg

SEQ ID NO: 1180 - DNA, 225 bp, Unknown
  Encodes 16S rRNA from Anaeroplasma
agagtttgatcatggctcaggattaacgctggcggcgtgcctaatacatgcaagtcgaatggtagtagcaatacaaaccatggcgaacgggtgagtaacacgtaggcaacctgactttaagacgaggataaccgttggaaacgacggataatactggataggacatcacaaagggcatccttagatgtttaaaggttatcatgccacttagagaggggcctgcgg

SEQ ID NO: 1181 - DNA, 225 bp, Unknown
  Encodes 16S rRNA from Sporotomaculum
agagtttgatcctggctcaggacgaacgctggcggcgtgcttaacacatgcaagtcgaacgaggaatgccgaaaagcttgctttttgacatttcgagtggcggacgggtgagtaacgcgtgaggaacctgtcttctacagggggataacgtcccgaaagggacgctaataccgcataagaccacggtgccgcatggcacaggggtcaaaggagcaatccggtgga

SEQ ID NO: 1182 - DNA, 225 bp, Unknown
  Encodes 16S rRNA from Clostridium IV
agagtttgatcctggctcaggatgaacgctggcggcgtgcctaacacatgcaagtcgaacggagcttgagggcttgcccttaagcttagtggcggacgggtgagtaacgcgtgagtaacctgcctttgagaggggaataacttcccgaaagggatgctaataccgcataacacataactgtcgcatggcagaaatgtcaaagattatatcgctcaaagatggact

SEQ ID NO: 1183 - DNA, 225 bp, Unknown
  Encodes 16S rRNA from Enterorhabdus
agagtttgatcatggctcaggatgaacgctggcggcgtgcctaacacatgcaagtcgaacggagaaaccgccctcgggcggagatgaagtggcgaacgggtgagtaacacgtgaccaacctgccccgcgctccgggacagcctcgcgaaagcgggattaataccggatgcgccgcgggccccgcatggggcccgcgggaaagcccaggcggcgcgggatggggtc

SEQ ID NO: 1184 - DNA, 225 bp, Unknown
  Encodes 16S rRNA from Bacteroides
agagtttgatcctggctcaggatgaacgctagctacaggcttaacacatgcaagtcgaggggcagcattaagtcagcttgctgatttagatggcgaccggcgcacgggtgagtaacgcgtatccaacctgccccctacccggggatagccttgcgaaagtaagattaatacccggtgctgttgcgatcccgcatggggatgcaacgaaagattcatcggtagggg

SEQ ID NO: 1185 - DNA, 225 bp, Unknown
  Encodes 16S rRNA from Anaerotruncus
agagtttgatcctggctcaggatgaacgctggcggcgtgcctaacacatgcaagtcgaacgaagctccgatacggaatcttcggaggaagtagaggaagacttagtggcggacgggtgagtaacgcgtgagcaacctgcctttcggagggggataacgattggaaacgatcgctaataccgcataacatatacgtatcgcatggtatgtatatcaaagctgaggc

SEQ ID NO: 1186 - DNA, 225 bp, Unknown
  Encodes 16S rRNA from Rhodopirellula
agagtttgatcatggctcagaatgaacgttggcggcgtggattaggcatgcaagtcgaacggtaaggttacttagcttgctttgtaaccctagagtggcgaaagggatagtacaatgtagatcatataccctcaggttggggatagcgtctggaaacgggcggtaatacccgataacatctccggatcaaaggtgagattccgcctgaggattagtttacacact

SEQ ID NO: 1187 - DNA, 225 bp, Unknown
  Encodes 16S rRNA from Clostridium XlVa
agagtttgatcctggctcaggatgaacgctggcggcgtgcttaatacatgcaagtcgaacgaggaattgtgattgaagttttcggatggatttcacttttccgagtggcggacgggtgagtaacgcgtgggtaacctgccttacacagggggacaacagctggaaacggctgctaataccgcataacccgctagagtcgcatgactcagacggaaaagatttatc

SEQ ID NO: 1188 - DNA, 225 bp, Unknown
  Encodes 16S rRNA from Gelidibacter
agagtttgatcatggctcaggataaacgctagcggcaggcctaacacatgcaagtcgagcggcagcgggagtggcaacacttgccggcgagcggcggacgggtgagtaacgcgtatgcaacctgcccaccacacggagatagccgaccgaaaggacgattaaactccgatggcattgggagccggcatcggcatccaattaaatatttataggtggtggatgggc

SEQ ID NO: 1189 - DNA, 225 bp, Unknown
  Encodes 16S rRNA from Anaerofustis
agagtttgatcatggctcaggacgaacgctggcggcgtgcttaacacatgcaagtcgaacgggaagctttggttagttcgctaaacaaagtggacagtggcgaacgggtgagtaacgcgtaggtaaccaacctcatactgggggatagcctttggaaacgaagagtaataccgcataagaccacactgtcgcatggcagaggggtaaaagatttatcggtatgag

SEQ ID NO: 1190 - DNA, 225 bp, Unknown
  Encodes 16S rRNA from Butyricicoccus
agagtttgatcctggctcaggataaacgctggcggcgcacataagacatgcaagtcgaacgggaactttattgaagttatctgatataaagttctagtggcggactggtgagtaatgtataagcaacctgcctgcaagaggggaataacagtgagaaatcattgctaataccgcataagctgtgagtatggcatcatacaaacagaaaaggaagcaattccgctt

SEQ ID NO: 1191 - DNA, 225 bp, Unknown
  Encodes 16S rRNA from Butyricicoccus
agagtttgatcctggctcaggatgaacgctggcggcgtgcataacacattcaagtcgaacggagatattgggatcaatccttcgggaagcgtttcaatattttagtggcggacgggtgagtaacgcgtgagcaacctgccttgaagagggggataacacagggaaacttgtgctaataccgcataacgtacgatggtcgcatggccgacgtaccaaagctccgac

SEQ ID NO: 1192 - DNA, 225 bp, Unknown
  Encodes 16S rRNA from Clostridium XlVa
agagtttgatcctggctcaggatgaacgctggcggcgtgcctaacacatgcaagtcgaacgaagacgcttattcagattctttcgggatgacgaatttgtggactgagtggcggacgggtgagtaacgcgtgggtaacctgccttgtacagggggacaacagttagaaatgactgctaataccgcataagccaacggaatcgcatgattcagttggaaaaactcc

SEQ ID NO: 1193 - DNA, 225 bp, Unknown
  Encodes 16S rRNA from Cryptanaerobacter
agagtttgatcatggctcaggacgaacgctggcggcatgcctaacacatgcaagtcgaacggaacaagactggctgtagcgatactttcggtcttgtttagtggcgaacgggtgagtaacacgtgagcaacctgccttttacacagggataacagccggaaacggctgctaataccggataagaccacaccgaggcatctcggaggggtcaaagcgatttagcgg

SEQ ID NO: 1194 - DNA, 225 bp, Unknown
  Encodes 16S rRNA from Clostridium XlVa
agagtttgatcatggctcaggatgaacgctggcggcgtgcttaatacatgcaagtcgaacgaagctgatgcgacggaacctttcggggggaagatgcattagactgagtggcggacgggtgagtaacgcgtgggtaacctgccttatacagggggataacatttggaaacagatgctaataccgcataagcgcacagaaccgcatggttcagtgtgaaaagctcc

SEQ ID NO: 1195 - DNA, 225 bp, Unknown
  Encodes 16S rRNA from Mogibacterium
agagtttgatcatggctcaggatgaacgctggcggcgtgcctaatacatgcaagtcgagcgagaatctcctttgaagcgttttcggacaattctgtggagaggaaagcggcggacgggtgagtaacgcgtaggcaacctgcccttagcagagggatagccattggaaacgatgattaaaacctcataatgccattcttacacatgttgggatggccaaagattta

SEQ ID NO: 1196 - DNA, 225 bp, Unknown
  Encodes 16S rRNA from Syntrophococcus
agagtttgatcatggctcaggatgaacgctggcggcgtgcttaacacatgcaagtcgaacggagctattttagaaagcggagcttgctctgatggatatgatagcttagtggcggacgggtgagtaacgcgtgggcaacctgccttacacagggggacaacagttggaaacgactgctaataccgcataagccggtaatctcgcatgggatatccggaaaagatt

SEQ ID NO: 1197 - DNA, 225 bp, Unknown
  Encodes 16S rRNA from Bacteroides
agagtttgatcatggctcaggatgaacgctagcggcaggcttaacacatgcaagtcgaggggcagcgtgggggtagcaatactcccgacggcgaccggcgcacgggtgagtaacgcgtatgcaacctttcccagacagggggatagcccagggaaacttggattaataccccgtaggccggatgagggcatcctcgtccggttaaagttccggcggtctggggtg

SEQ ID NO: 1198 - DNA, 225 bp, Unknown
  Encodes 16S rRNA from Treponema
agagtttgatcatggctcagaacgaacgctggcggcgcgtcttaagcatgcaagtcgggcgggattcatgtgcttgcacatgatgagagcggcggactggcgaggagcgcgtgggtgacgcaccccccggacggggacagccggcagaaatgccgggtgataccggatgaggtcccccttgttggaggagggggaggaaaggggcttcggccccgccgggggagc

SEQ ID NO: 1199 - DNA, 225 bp, Unknown
  Encodes 16S rRNA from Coraliomargarita
agagtttgatcatggctcagagtgaacgctggcggcgtggctaagacatgcaagttgagcgagaatataccttcgggtatagggaagcggcaaacgggtgagtaacacgtaagtaacctacccttgagactgggatagctcagcgaaagttgaggtaataccggatgacaaccattaacgcatgttaatggattcaaagggatgagacgatgctcaaggaggggc

SEQ ID NO: 1200 - DNA, 225 bp, Unknown
  Encodes 16S rRNA from Ruminococcus
agagtttgatcctggctcaggacgaacgctggcggcacgcttaacacatgcaagtcgaacgggactaagagagaagcttgcttcacttttagtttagtggcggacgggtgagtaacacgtgagtaacctgcccttatcaggggaatagcctccggaaacggagagtaataccgcataagatgacgatgtggcatcacatagtcataaaagattttatcggataag

SEQ ID NO: 1201 - DNA, 225 bp, Unknown
  Encodes 16S rRNA from Prevotella
agagtttgatcctggctcaggatgaacgctagctacaggcttaacacatgcaagtcgaggggcagcatgtcgtgtgcttgcacacgatgatggcgaccggcgcacgggtgagtaacgcgtatccaacctgcccatgactccgggatagcccgctgaaaagcggattaacaccggatggggtcgaacgaggacatctgatttcgaccaaagctttttgcggtcatg

SEQ ID NO: 1202 - DNA, 225 bp, Unknown
  Encodes 16S rRNA from Pseudaminobacter
agagtttgatcctggctcagaacgaacgctggcggcaggcttaacacatgcaagtcgagcgccccgcaaggggagcggcagacgggtgagtaacgcgtgggaatctacccaactctacggaataacccagggaaacttggactaataccgtatacgtcctccgggagaaagatttatcggagttggatgagcccgcgtcggattagctagttggtgaggtaatgg

SEQ ID NO: 1203 - DNA, 225 bp, Unknown
  Encodes 16S rRNA from Prevotella
agagtttgatcatggctcaggatgaacgctagcggcaggcttaacacatgcaagtcgaggggcagcgcgttgtagcaatacaatggcggcgaccggcgaaagggtgagtaacgcgtgagcgacgtgcccgtcacagggggacaagggctggaaacggcttctgataccccataggaatgtatgcttcatggtgtatgtttgaaagatttatcggtgacggatcgg

SEQ ID NO: 1204 - DNA, 225 bp, Unknown
  Encodes 16S rRNA from Treponema
agagtttgatcctggctcagaacgaacgctggcggcgcgtcttaagcatgcaagtcgagcggcaagatggggttcgccccgtcccagagcggcggactggtgagtaacacgtgggtgacgcaccctcgggatcgggatagcctgcagaaatgcagggtaataccggatgatgtccgtgcagccggaatgcacggaggaaaggggcttcggccccgccggaggaac

SEQ ID NO: 1205 - DNA, 225 bp, Unknown
  Encodes 16S rRNA from Syntrophococcus
agagtttgatcatggctcaggatgaacgctggcggcgtgcttaacacatgcaagtcgaacgggaactctagactgaaggttcgctggaagtttagaaattctagtggcggacgggtgagtaacgcgtgggtaacctgcctataagacgtgaacaacagttagaaatgactgctaatacacgataagcacaccagtatcgcatgatacagtgtgaaaagaatttcg

SEQ ID NO: 1206 - DNA, 225 bp, Unknown
  Encodes 16S rRNA from Clostridium IV
agagtttgatcatggctcaggatgaacgctggcggcgtgcataacacattcaagtcgaacggagatatactgattaatccttcgggaagcgtcggtatattttagtggcggacgggtgagtaacgcgtgagcaacctgccttgaagagggggataacacagggaaacttgtgctaataccgcataacatacaagaatcgcatggttttagtatcaaagctccgac

SEQ ID NO: 1207 - DNA, 225 bp, Unknown
  Encodes 16S rRNA from Tenacibaculum
agagtttgatcctggctcaggatgaacgctagcggcaggcttaacacatgcaagtcgaggggtaacaggcggtagcaatactgtgctgacgaccggcgcacgggtgcgtaacgcgtatgcaacctgcccgcgacagggggataacggagggaaacttccactaatatcccatggtgccgaaggttcgcatgggctttcggctaaaggggcgacccggttgcggat

SEQ ID NO: 1208 - DNA, 205 bp, Unknown
  Encodes 16S rRNA from Parabacteroides
agagtttgatcctggctcaggatgaacgctagcgacaggcttatggtcaatggacgcgagtctgaaccagccaagtcgcgtgcgggacgaaggccctccgggtcgtaaaccgctttagccggggagtaacgtgggggacgtgtccctcagtgagagtacccggagaataagcatcggctaactccgtgccagcagccgcggtaat

SEQ ID NO: 1209 - DNA, 225 bp, Unknown
  Encodes 16S rRNA from Luteimonas
agagtttgatcctggctcagaacgaacgctggcggcaggcctaaaacatgcaagttgaacgggtgtagcaatacatcagtagcggacgggtgaggaacatatgggaacgtgccctttggtgggggataacttctggaaacgggaggtaataccgcataagccatgagtgggaaatatttatagccggaggagcggcccatattggattagctagttggttaggta

SEQ ID NO: 1210 - DNA, 225 bp, Unknown
  Encodes 16S rRNA from Eubacterium
agagtttgatcctggctcaggacgaacgctggcggcgtgcttaacacatgcaagtcgaacgaagcttgaatttagatttcttcggaatgataaatgatatgactgagtggcggacgggtgagtaacgcgtgagcaacctgcccttcggagggggatagcgtttggaaacgaacggtaataccgcataatgttaacggatggcatcgtctgttaaccaaaactccg

SEQ ID NO: 1211 - DNA, 225 bp, Unknown
  Encodes 16S rRNA from Roseburia
agagtttgatcatggctcaggatgaacgctggcggcgtgcctaacacatgcaagtcgaacggacccatgggagtgattagcttgctatgaactcccggaaggttagtggcggacgggtgagtaacgcgtgggtaacctgcctcatacagggggatagcagttggaaacgactggtaataccgcataagcgcacagtaccgcatggtacagtgtgaaaagctccga

SEQ ID NO: 1212 - DNA, 225 bp, Unknown
  Encodes 16S rRNA from Oscillibacter
agagtttgatcatggctcaggacgaacgctggcggcgtgcttaacacatgcaagtcgaacgaagctctcacgcttgagttttcggacaagagggtgagaagacttagtggcggactggtgagtaacgcgtgagcaacctgccctccggtgggggacaacagttggaaacgactgctaataccgcataatgtacaggggccgcatgacccttgtaccaaagcttaa

SEQ ID NO: 1213 - DNA, 225 bp, Unknown
  Encodes 16S rRNA from unknown taxa
agagtttgatcatggctcaggacgaacgctggcggcgtgcttcatacatgcaagtcgaacgagaatcagaagcttgcttctgaggaaagtggcggacgggtgagtaatatgtagagaatctgccctttagatggggacaacagttggaaacgactgctaatacccaatatgcgcgtagttgagatactattcgtgaaaactccggtgctaaaggatgagtctgca

SEQ ID NO: 1214 - DNA, 225 bp, Unknown
  Encodes 16S rRNA from Prevotella
agagtttgatcatggctcaggatgaacgctagctacaggcttaacacatgcaagtcgaggggcagcacggaggtagcttgctacttttggtggcgaccggcgaatgggtgagtaacgcgtatccaacctgccgcgtgcccggggatagcccctggaaacggggattaagacccgatggcgtggtgccgccgcatgacggcgccattaaaccggcacgcgatgggg

SEQ ID NO: 1215 - DNA, 225 bp, Unknown
  Encodes 16S rRNA from Clostridium IV
agagtttgatcatggctcaggacgaacgctggcggcgcgcctaacacatgcaagtcgaacggagagtgcgctttgaatccttcgggacgattagctcatttcttagtggcggacgggtgagtaacacgtgagcaacctgccttgcagagcgggataacgattggaaacgatcgctaataccgcataatatatgattgtcgcatggctttcatatcaaagatttat

SEQ ID NO: 1216 - DNA, 225 bp, Unknown
  Encodes 16S rRNA from Treponema
agagtttgatcatggctcagaacgaacgctggcggcgcgtcttaagcatgcaagtcgagcgggattatccagcttgctggatatgagagcggcggactggtgagtaacacgtaggcaacgtacccttcggacggggatagccggcagaaatgtcgggtaataccggatgtgaacatgagccgtaaaggttcatgtggaaaggagcttcggctccgccggaggagc

SEQ ID NO: 1217 - DNA, 225 bp, Unknown
  Encodes 16S rRNA from Clostridium IV
agagtttgatcatggctcaggatgaacgctggcggcgtgcttaacacattcaagtcgaacggtgaagggggcttcggttcccggatcagtggcggacgggtgagtaacgcgtgaataacctgcctgtgtgtgggggataacagttggaaacggctgctaataccgcataacgtacggacaccgcatgatgaccgtaccaaagatttattgcgcacagatggattc

SEQ ID NO: 1218 - DNA, 225 bp, Unknown
  Encodes 16S rRNA from Victivallis
agagtttgatcctggctcagaacgaacgctggcggcatggattaggcatgcaagtcgaacgggtgcagcaatgcaccagtggcgcaagggtgaggaacacgtgagtaatctaccctcaagattgggatagctcctggaaacgggaattaataccggatgaaacagtttatccgcatggatgaacttttaaagcagcaatgcgcttgaggaggagctcgcgtccca

SEQ ID NO: 1219 - DNA, 225 bp, Unknown
  Encodes 16S rRNA from Clostridium XlVa
agagtttgatcctggctcaggatgaacgctggcggcgtgcctaacacatgcaagtcgaacgaagaccccgaggcagagatttcggtcgaagccaagggaggactgagtggcggacgggtgagtaacgcgtggataacctgccccatacagggggatagcagttggaaacgactgataataccgcataagcgcacgagggggcatcctcaagtgtgaaaaacttta

SEQ ID NO: 1220 - DNA, 225 bp, Unknown
  Encodes 16S rRNA from Oscillibacter
agagtttgatcatggctcaggacaaacgctggcggcgtgcctaacacatgcaagtcgaacggagcttatcaccttcgggaggtaagcttagtggcggactggtgagtaacgcgtgagcaacctgcccttcagtgggggacaacagccggaaacggctgctaataccgcatgagattatgggaaggcatcttcttgtaattaaagatttattgctgaaggatgggc

SEQ ID NO: 1221 - DNA, 225 bp, Unknown
  Encodes 16S rRNA from Papillibacter
agagtttgatcatggctcaggataaacgctggcggcgtgcataacacattcaagtcgaacgaagcacttcggaacgagacttcggtcaagtgaagatttgacttagtggcggacgggtgagtaacgcgtgagcaatctgcctcggggtgcgggataacgtttggaaacgaacgctaataccgcatgacgcatgaggttcacatggaccatatgccaaaggtttac

SEQ ID NO: 1222 - DNA, 225 bp, Unknown
  Encodes 16S rRNA from Cellulosilyticum
agagtttgatcatggctcaggataaacgctggcggcgcacataagacatgcaagtcgaacgagtttaatacctagcttgctaggtaagcgactagtggcggactggtgagtaacacgtaaggaacctgcctattagagaggaatacctttgagaaatcagagctaatacctcatatgccttatttatcgcatgataaaagagggaaaggagcaatccactaatag

SEQ ID NO: 1223 - DNA, 225 bp, Unknown
  Encodes 16S rRNA from Treponema
agagtttgatcctggctcagaacgaacgctggcggcgcgtcttaagcatgcaagtcgggcgggattccccagcttgctggggatgagagcggcggactggtgagtaacgcgtgggcgacgcgccccgtggaccgggatagcctgtggaaacacagggtaataccgggcgagctcccccgcgccggaggcgggggaggaaaggagccgaggctccgccacgggagc

SEQ ID NO: 1224 - DNA, 225 bp, Unknown
  Encodes 16S rRNA from Ruminococcus
agagtttgatcatggctcaggacgaacgctggcggcgtgcctaacacatgcaagtcgaacggagctgaggagcttgcttctcagcttagtggcggacgggtgagtaacgcgtgagtaacctgcctccgagagtggaataacgttttgaaaagaacgctaataccgcataatattatgaagtcgcatggctttataatcaaagagtatatcgctcggagatggact

SEQ ID NO: 1225 - DNA, 225 bp, Unknown
  Encodes 16S rRNA from Coraliomargarita
agagtttgatcctggctcagagtgaacgctggcggcgtggctaagacatgcaagttgagcgagaatatgctttcgggcatagggaagcggcaaacgggtgagtaacacgtaagtaacctgcccttgagactgggatagctcagcgaaagttgaggtaataccggatgacaaccattgatgcatgttaatggattgaaagggatgaaaggatgctcaaggaggggc

SEQ ID NO: 1226 - DNA, 225 bp, Unknown
  Encodes 16S rRNA from Butyricicoccus
agagtttgatcatggctcaggacgaacgctggcggcgtgcctaacacatgcaagtcgaacggagttgaggagcttgctccttaacttagtggcgatcggtagccggactgagaggttgaacggccacattgggactgagacacggcccagactcctacgggaggcagcagtgggggatattgcgcaatgggggcaaccctgacgcagcaacgccgcgtgaaggat

SEQ ID NO: 1227 - DNA, 225 bp, Unknown
  Encodes 16S rRNA from Blautia
agagtttgatcatggctcaggatgaacgctggcggcgtgcctaacacatgcaagtcgaacggagcttatggtgaaagatacttcggtagatggaagcgtaagcttagtggcggacgggtgagtaacgcgtggagaacctgccctgtaccgggggataacagagggaagcttctgctaataccgcataagcgcacggcaccgcatggtgcagtgtgaaaaactccg

SEQ ID NO: 1228 - DNA, 225 bp, Unknown
  Encodes 16S rRNA from Lachnospiracea incertae sedis
agagtttgatcatggctcaggatgaacgctggcggcacgcttaacacatgcaagtcgagcggagaattgacttcggttgattcttagcggcggacgggtgaggaacgcgtgggtaatctgccctatacaggggaataacacagagaaatttgtgataaaaccgcataagcccacgggatcgcatggtcctgtgagaaaaactccggtggtataggatgagcccgc

SEQ ID NO: 1229 - DNA, 225 bp, Unknown
  Encodes 16S rRNA from Prevotella
agagtttgatcatggctcaggatgaacgctagcggcaggcttaacacatgcaagtcgaggggcagcgcggggtagcaatactctggcggcgaccggcagacgggtgcgtaacgcgtatgcaacctacccaccacaggggtatagcccggcgaaagccggaataatcccccatggttccaacccaccgcatgatgagttggataaacccgcgagggggtgatggat

SEQ ID NO: 1230 - DNA, 225 bp, Unknown
  Encodes 16S rRNA from Clostridium IV
agagtttgatcatggctcaggacgaacgctggcggcatgcctaacacatgcaagtcgaacggagttatttggattcgtctggataacttagtggcggacgggtgagtaacacgtgagcaacctgcccttcagagggggacaacagctggaaacggctgctaataccgcataacatatacgaaaggcatcttttgtatatcaaagatttatcgctgagggatgggc

SEQ ID NO: 1231 - DNA, 225 bp, Unknown
  Encodes 16S rRNA from Clostridium IV
agagtttgatcatggctcaggatgaacgctggcggcgtgcataacacattcaagtcgaacgagcgagtgcccttcgggacacgagctagtggcggacgggtgagtaacgcgtgagcaacctgcccctgtgtgcgggataacgtcgggaaactgacgctaataccgcataacacatgagtcccgcatggggcatatgtcaaagatttattgcacagggatgggctc

SEQ ID NO: 1232 - DNA, 225 bp, Unknown
  Encodes 16S rRNA from Clostridium III
agagtttgatcatggctcaggacgaacgctggcggcgtgcctaacacatgcaagtcgaacgagaaatatggaaaggatcccttcggggagaatagaaatatggacagtggcggacgggcgagtaacgcgtgagtaacctgcccataagcgggggatagccgatggaaacgtcgagtaataccccatgatgtatatatatcgcatggtatatatattaaagattta

SEQ ID NO: 1233 - DNA, 225 bp, Unknown
  Encodes 16S rRNA from Neptunomonas
agagtttgatcctggctcaggatgaacgctagctacaggcttaacacatgcaagtcgaggggaatattgcacaatgggggaaaccctgatgcagccatgccgcgtgtgtgaagaaggccttcgggttgtaaagcacttttgcattcgaggaagacagcgtataaataaatgcgctatttgacgttagagtgtgaataagcaccggcaaactccgtgccagcagcc

SEQ ID NO: 1234 - DNA, 225 bp, Unknown
  Encodes 16S rRNA from Clostridium IV
agagtttgatcctggctcaggatgaacgctggcggcgtgcataacacattcaagtcgaacggacaccttcgggtgtcagtggcggacgggtgagtaacgcgtgagtaacctgccgcggattggggaataacgaccggaaacagtcgctaataccgcataacgcacgatgaccgcatggtcgacgtgccaaagatttatcgatccgcgatggactcgcgtccaatt

SEQ ID NO: 1235 - DNA, 225 bp, Unknown
  Encodes 16S rRNA from Howardella
agagtttgatcctggctcaggacgaacgctggcggcatgcttaacacatgcaagtcgaacggactgattccttcgggatgaaagttagtggcgaacgggtgagtaatgtatgagcaacctgcctctgtcaacgggataacagttggaaacgactgctaatacggtataagaccacggcaccgcatggtgctgcggtaaaagatttttcggacagagatgggctca

SEQ ID NO: 1236 - DNA, 225 bp, Unknown
  Encodes 16S rRNA from Clostridium IV
agagtttgatcatggctcaggatgaacgctggcggcgtgcataacacattcaagtcgaacggagatagaagcttcggtttttatcttagtggcggacgggtgagtaacgcgtgagcaacctgcccctgtgtgcgggataacgtttggaaacggacgctaataccgcatgacccaacgggaccgcatgatcttgttggcaaagattcattgcacagggatgggctc

SEQ ID NO: 1237 - DNA, 220 bp, Unknown
  Encodes 16S rRNA from Roseburia
agagtttgatcatggctcaggatgaacgctagctacaggcttaacacatgcaagtcgagaggcagcagtggggaatattgcacaatgggggaaaccctgatgcagcgacgccgcgtgagcgaagaagtatttcggtatgtaaagctctatcagcagggaagataatgacggtacctgactaagaagcaccggctaaatacgtgccagcagccgcggtaat

SEQ ID NO: 1238 - DNA, 225 bp, Unknown
  Encodes 16S rRNA from Oscillibacter
agagtttgatcctggctcaggacgaacgctggcggcgtgcttaacacatgcaagtcgaacgaagctctcacgcttgagttttcggacaagagggtgagatgacttagtggcggactggtgagtaacgcgtgagcaacctgccctccggtgggggacaacagttggaaacgactgctaataccgcataatgtacagagaccgcatgatctttgtaccaaagcttta

SEQ ID NO: 1239 - DNA, 225 bp, Unknown
  Encodes 16S rRNA from Clostridium XlVa
agagtttgatcatggctcaggatgaacgctggcggcgtgcttaacacatgcaagtcgaacgaggaattaccgatgaagttttcggatggatttggtttttccgagtggcggacgggtgagtaacgcgtgggtaacctgccttacactgggggacaacagagagaaatttctgctaataccgcataacccgctaggggcgcatgccccggacggaaaagatttatc

SEQ ID NO: 1240 - DNA, 225 bp, Unknown
  Encodes 16S rRNA from Clostridium IV
agagtttgatcatggcttaggatgaacgctggcggcgtgcataacacattcaagtcgaacggagagtgagcttcggctcacaatcagtggcggacgggtgagtaacgcgtgagcaacctgcccggaagcgtgggataacagagggaaacttctgctaataccgtatatcgtattcggatcgcatgttctgaatacaaaagggtttccgcttccggatgggctcgc

SEQ ID NO: 1241 - DNA, 225 bp, Unknown
  Encodes 16S rRNA from Sporobacter
agagtttgatcatggctcaggatgaacgctggcggcgtgcctaacacattcaagtcgaacggtgaagggacttcggtcccggatcagtggcggacgggtgagtaacgcgtgagcaacctgcctctgactgggggataacagccggaaacggctgctaataccgcataacgtgcgaccttcgcatgaaggacgcaccaaagatttatcggtcagagatgggctcgc

SEQ ID NO: 1242 - DNA, 225 bp, Unknown
  Encodes 16S rRNA from Clostridium XlVa
agagtttgatcctggctcaggatgaacgctggcggcgtgcctaacacatgcaagtcgaacgaagcatattggaaagagcccttcgggacgatggaagatatgacttagtggcggacgggtgagtaacgcgtgggcaacctgccgtacacagggggacaacagctggaaacggctgctaataccgcataagcgcacagcttcgcatggagtagtgtgaaaagcatt

SEQ ID NO: 1243 - DNA, 225 bp, Unknown
  Encodes 16S rRNA from Butyricicoccus
agagtttgatcctggctcaggatgaacgctggcggcgtgcataacacattcaagtcgaacgaagcacttcggacagatcccttcggggtgaagactgatttgacttagtggcggacgggtgagtaacgcgtgagcaacctgccttgaagagggggataacacagggaaacttgtgctaataccgcataacgtaccgacatcgcatggtgatggtaccaaagcctt

SEQ ID NO: 1244 - DNA, 225 bp, Unknown
  Encodes 16S rRNA from Clostridium XlVa
agagtttgatcatggctcagattgaacgctggcggcgtgcctaacacatgcaagtcgaacgagcgaggtatgaaacctagtgaataccgagcgagtggcggacgggtgagtaacgcgtgggtaacctgccttacagagggggataacagtctgaaaagactgctaataccgcataagcacacagtaccgcatggtacagggtgaaaagaattatcactgtaagat

SEQ ID NO: 1245 - DNA, 225 bp, Unknown
  Encodes 16S rRNA from Filomicrobium
agagtttgatcatggctcagaacgaacgctggcggcaggcctaacacatgcaagtcgaacgccctagcaatagggagtggcagacgggtgagtaacgcgtgggaaccttcccagtggtacggaatagcccagggaaacttggagtaataccgtataatacccgaaaggggaaagatttatcgccattggatgggcccgcgttggattagctagttggtgaggtaa

SEQ ID NO: 1246 - DNA, 225 bp, Unknown
  Encodes 16S rRNA from Bacteroides
agagtttgatcctggctcaggatgaacgctagctacaggcctaacacatgcaagtcgcggggcagcatgggcgtagcaatacgcctgatggcgaccggcgcacgggtgcgtaacgcgtatccaacctggcccttactcgggtatagccctgcgaaagtaggattaatccccgatgttgtcaagcgatagccttttcacttgaccaaagagttattcggtaaggga

SEQ ID NO: 1247 - DNA, 225 bp, Unknown
  Encodes 16S rRNA from Clostridium XlVa
agagtttgatcatggctcaggatgaacgctggcggcgtgcctaacacatgcaagtcgaacgggactttatggaatgcgattcgtcaaatgaaataaagtttagtggcggacgggtgagtaacgcgtgggtaacctgccttacagagggggataacggttggaaacgactgctaataccgcataagcccacagtaccgcatggtacagggggaaaagatttatcgc

SEQ ID NO: 1248 - DNA, 225 bp, Unknown
  Encodes 16S rRNA from Brevundimonas
agagtttgatcatggctcaggacgaacgctggcggtgtgcctcatacatgcaagtcgaacgataaggttccttcgggaatacataagtggcggacgggtgagtacaacataggaaatctgccccaaagcgggggacaacagagggaaacttctgctaataccccatacgagcttagttgaaatactaatcttgaaagatttatcactttgggatgagcctgtgcc

SEQ ID NO: 1249 - DNA, 225 bp, Unknown
  Encodes 16S rRNA from Clostridium IV
agagtttgatcatggctcaggacgaacgctggcggcgtgcctaacacatgcaagtcgagcggagacataagaggaagcggaagttttcggatggaagcggacatttatgttttagcggcggacgggtgagtaacgcgtgagcaacctgtccctcacagggggataacacaccgaaaggtgtactaataccgcatgacactgctgaaggacatcctatagcagtca

SEQ ID NO: 1250 - DNA, 225 bp, Unknown
  Encodes 16S rRNA from Paracoccus
agagtttgatcatggctcagaacgaacgctggcggcaggcctaacacatgcaagtcgagcgagaccttcgggtctagcggcggacgggtgagtaacgcgtgggaatatgcccttctctacggaatagtcctgggaaactgggggtaataccgtatacgccctttgggggaaagatttatcggagaaggattagcccgcgttggattaggtagttggtggggtaat

SEQ ID NO: 1251 - DNA, 225 bp, Unknown
  Encodes 16S rRNA from Schlegelella
agagtttgatcctggctcagattgaacgctggcggcatgccttacacatgcaagtcgaacggcagcgggggagcttgctcctgccggcgagtggcgaacgggtgagtaatgcatcggaacgtgtcctgttgtgggggataactgatcgaaagatcagctaataccgcatgagacctgagggtgaaagcgggggatcgaaagacctcgcgcgacaggagcggccga

SEQ ID NO: 1252 - DNA, 225 bp, Unknown
  Encodes 16S rRNA from Clostridium XI
agagtttgatcctggctcaggatgaacgctggcggcgtgcctaacacatgcaagtcgagcgaacccttcggggtgagcggcggacgggtgagtaacgcgtgggtaacctgccctgtacacacggataacataccgaaaggtatgctaatacgagataatatattttaatcgcatggttaagatatcaaagctccggcggtacaggatggacccgcgtctgattag

SEQ ID NO: 1253 - DNA, 225 bp, Unknown
  Encodes 16S rRNA from Diaphorobacter
agagtttgatcctggctcagattgaacgctggcggcatgccttacacatgcaagtcgaacggtaacggaccttcgggtgccgacgagtggcgaacgggtgagtaatacatcggaacgtgcccgatcgtgggggataacgaggcgaaagctttgctaataccgcatacgatctacggatgaaagcaggggaccgcaaggccttgcgcggacggagcggccgatggc

SEQ ID NO: 1254 - DNA, 225 bp, Unknown
  Encodes 16S rRNA from Clostridium sensu stricto
agagtttgatcatggctcaggacgaacgctggcggcgcgcctaacacatgcaagtcgaacgggactagtgaccggagcttagaagtcttctaggttgcgttcactagttcagtggcggacgggtgagtaaagcatgagtaactttcccattagtggggaatagcttttggaaacagaagataataccgcatacatcgttgaggactcatgttctcttcggaaaag

SEQ ID NO: 1255 - DNA, 225 bp, Unknown
  Encodes 16S rRNA from Saccharopolyspora
agagtttgatcctggctcaggacgaacgctggcggcgtgcttaacacatgcaagtcgaacgctgaagctctgcccttgtggtggggtggatgagtggcgaacgggtgagtaacacgtgggtaatctgccccatactctgggataacccctggaaacgggggctaataccggataggacattctgccgcatggtggggtgtggaaagttccggcggtatgggatgg

SEQ ID NO: 1256 - DNA, 225 bp, Unknown
  Encodes 16S rRNA from Prevotella
agagtttgatcctggctcaggatgaacgctagctacaggcttaacacatgcaagtcgaggggcatcaggtatcaagcttgcttgatatgctggcgaccggcgcacgggtgcgtaacacgtatcgaaccttcccgcctctccgggacagccctctgaaaggaggattaataccggatggcttcaccttgccgcatggcatggtgaataaagattcatcggagacgg

SEQ ID NO: 1257 - DNA, 225 bp, Unknown
  Encodes 16S rRNA from Eggerthella
agagtttgatcctggctcaggatgaacgctggcggcgtgcctaacacatgcaagtcgaacgatgaaaccgcctccgggcggacatgaagtggcgaacgggtgagtaacacgtgaccaacctgccccgcgcaccgggacagccccccgaaagggggattaataccggatactccggccgggccgcatggcccggccgggaaagctccggcggcgcgggatggggtc

SEQ ID NO: 1258 - DNA, 225 bp, Unknown
  Encodes 16S rRNA from Gelidibacter
agagtttgatcctggctcaggataaacgctagcggcaggcctaacacatgcaagtcgagcggcagcgggagtagcaatacttgccggcgagcggcggacgggtgagtaacgcgtatgcaacctgcccaccacacggagatagccgaccgaaaggacgattaaactccgatggcattgggacccggcatcgggatccaattaaatatttataggtggtggatgggc

SEQ ID NO: 1259 - DNA, 225 bp, Unknown
  Encodes 16S rRNA from Prevotella
agagtttgatcctggctcaggatgaacgctagctacaggcttaacacatgcaagtcgaggggcagcatggcggtggcttgccaccgccgatggcgaccggcgcacgggtgagtaacgcgtatccaacctgcccacaacctccgaatagcccgccgaaaggcggattaatgcgggatgtggtctgaagaagacatctgaactagaccaaaggttttttccggttgt

SEQ ID NO: 1260 - DNA, 225 bp, Unknown
  Encodes 16S rRNA from Pseudomonas
agagtttgatcatggctcagattgaacgctggcggcaggcctaacacatgcaagtcgagcggatgaagggagcttgctcccggattcagcggcggacgggtgagtaatgcctaggaatctgcctggtagtgggggacaacgttccgaaaggagcgctaataccgcatacgtcctacgggagaaagtgggggatcttcggacctcacgctatcagatgagcctagg

SEQ ID NO: 1261 - DNA, 225 bp, Unknown
  Encodes 16S rRNA from Prevotella
agagtttgatcatggctcaggatgaacgctagctacaggcttaacacatgcaagtcggggggcagcacggggtgcagcaatgcacttgggtggcgaccggcgaatgggtgagtaacgagtatccaacctgccccgcgctccgggacagccccgcgaaagcgggattaataccggatgcggcatggttcccgcatgggctccatgtcaaagattcatcggcgcggg

SEQ ID NO: 1262 - DNA, 225 bp, Unknown
  Encodes 16S rRNA from Prevotella
agagtttgatcatggctcaggatgaacgctagctacaggcttaacacatgcaagtcgaggggcatcggggaggtagcttgctatctctgccggcgaccggcgcacgggtgagtaacgcgtatccaacctgccgcatagtcgggcacagccctctgaaaggaggattaatgccggatgtggtcttagtgagacatctcatatagactgaagatttattgctatgcg

SEQ ID NO: 1263 - DNA, 225 bp, Unknown
  Encodes 16S rRNA from Prevotella
agagtttgatcatggctcaggatgaacgctagctacaggcttaacacatgcaagtcgaggggcagcatggcggtggcttgccactgccgatggcgaccggcgcacgggtgagtaacgcgtatccaacctgcccgcaaccgcggaatagcccgccgaaaggcggattaatgccgcatgagctcgcgtgggggcatctgcccgcgagcaaaggttcactccggttgc

SEQ ID NO: 1264 - DNA, 225 bp, Unknown
  Encodes 16S rRNA from Brevundimonas
agagtttgatcatggctcaggacgaacgctggcggtgtgcctcatacatgcaagtcgaacgagaagctttcttcggaaagtggaaagtggcggacgggtgagtacaacataggaaatctgccctaaagtgggggacaacagagggaaactcctgctaataccccatacgagcttagttgaaatactaatcttgaaagatttatcgctttaggatgagcctgtgcc

SEQ ID NO: 1265 - DNA, 225 bp, Unknown
  Encodes 16S rRNA from Bacteroides
agagtttgatcctggctcaggatgaacgctggcggcgtgcctaacacatgcaagtcgaggggcagcatggtcttagcttgctaaggccgatggcgaccggcgcacgggtgagtaacgcgtatccaacctgccgtccagtaggggacagcccgtagaaatgcggattaataccctatgttctccgaggatgacatcagattcggagtaaagattcatcgctggacg

SEQ ID NO: 1266 - DNA, 225 bp, Unknown
  Encodes 16S rRNA from Clostridium XlVa
agagtttgatcctggctcaggataaacgctggcggcgtgcttaacacatgcaggtcgaacgaggtatcgaagattaatcttcggaagcgtttttgataccgagtggcggacgggtgagtaacgcgtgggtaacctgcccggaagagggggacaacagttggaaacgactgctaataccgcataagccgacggagccgcatggctctgccggaaaaggagtgatcc

SEQ ID NO: 1267 - DNA, 209 bp, Unknown
  Encodes 16S rRNA from Photobacterium
agagtttgatcctggctcagattgaacgctggcgggggaatattgcacaatgggggaaaccctgatgcagccatgccgcgtgtgtgaagaaggccttcgggttgtaaagcacttttgcattcgaggaagacagcgtataaataaatgcgctatttgacgttagagtgtgaataagcaccggcaaactccgtgccagcagccgcggtaat

SEQ ID NO: 1268 - DNA, 225 bp, Unknown
  Encodes 16S rRNA from Clostridium XlVa
agagtttgatcatggctcaggatgaacgctggcggcgtgcttaatacatgcaagtcgaacgggataaattggaagcttgcttttgatttatctagtggcggacgggtgagtaacgcgtgggtaacctgcctcatacagggggataacagttagaaatgactgctaaaaccgcataacattgtggtaccgcatgatatcacgatcaaatatttataggtatgagat

SEQ ID NO: 1269 - DNA, 225 bp, Unknown
  Encodes 16S rRNA from Clostridium XlVb
agagtttgatcatggctcaggatgaacgctggcggcgtgcctaacacatgcaagtcgagcgaagggttgagagcttgctcttaactacttagcggcggacgggtgagtaacgcgtgggtaacctgccctgtacagaggaataacagttagaaatgactgctaatgcctcataagccgacgaaatggcatcattatgtcggaaaagatttatcggtacaggaggga

SEQ ID NO: 1270 - DNA, 225 bp, Unknown
  Encodes 16S rRNA from Prevotella
agagtttgatcatggctcaggatgaacgctagctacaggcttaacacatgcaagtcgaggggcagcagggcaatagcttgctattgctgctggcgaccggcgcacgggtgagtaacgcgtatccaacctaccccgcggtcagggacagcccggcgaaagtcggattaatacctgatgcagtcagaagagggcatctgattttgacgaaagattttatcgcctcgg

SEQ ID NO: 1271 - DNA, 225 bp, Unknown
  Encodes 16S rRNA from Clostridium IV
agagtttgatcatggctcaggacgaacgctggcggcgtgcttaacacatgcaagtcgaacgaagcttgatttatgatttcttcggaatgaataatgatatgacttagtggcggacgggtgagtaacgcgtgaggaacctgcctttcagagggggacaacatttggaaacgaatgctaataccgcataacgcattttaaggacatccttttaatgccaaagattta

SEQ ID NO: 1272 - DNA, 225 bp, Unknown
  Encodes 16S rRNA from Anaeroplasma
agagtttgatcatggctcaggattaacgctggcggcgtgcctaatacatgcaagtcggatggttagcttgctaaccatggcgaacgggtgagtaacacgtaggtaacctgtctaagacacgaggataaccattggaaacgatggataatactggataggacatttgaaggcatctttggatgtttaaagatttatcggtaatagaggggcctgcggcgcattagc

SEQ ID NO: 1273 - DNA, 225 bp, Unknown
  Encodes 16S rRNA from Caldilinea
agagtttgatcctggctcaggatgaacgctggcggcgtgcttaacacatgcaagtcgaacgtgagggtgcagcaatgtacctgaaagtggcaaacgggtgagtaacacgtagatgacctgcctcgtagtgggggataaccacgggaaactgtggctaataccgcatggtcttgttagtatgggaatactttcaagtaaagctttatgtgctatgagaggggtctg

SEQ ID NO: 1274 - DNA, 225 bp, Unknown
  Encodes 16S rRNA from Clostridium XlVa
agagtttgatcatggctcaggatgaacgctggcggcgtgcctaacacatgcaagtcgaacggagacttggcgctgacgagtgaaatagcttgctatggaacaaatcttgccaagacttagtggcggacgggtgagtaacgcgtggacaacctggcccatacagggggacagcagctggaaacggctgataataccgcataagcgcacagtatcacatggtacagt

SEQ ID NO: 1275 - DNA, 225 bp, Unknown
  Encodes 16S rRNA from Victivallis
agagtttgatcatggctcagaatgaacgctggcggcatggattaggcatgcaagtcgaacggggcgcagcgatgcgcccagtggcgaaagggtgagtagcacgtgaagaacctgcccccggatccggaacaagcgctggaaacggcgtctgatacgggatgtggacgtcccccgcatggggggcgctctaaagattcatcgtccggggagggcttcgcgtcccat

SEQ ID NO: 1276 - DNA, 225 bp, Unknown
  Encodes 16S rRNA from Brevundimonas
agagtttgatcatggctcaggacgaacgctggcggcgtgcttcatacatgcaagtcgaacgagaatctctagcttgctagagaggaaagtggcggacgggtgagtaatatgtagagaatctgccctagagagtgggacaacagagggaaacttctgctaataccgcatatgcgcgtagctgagatgctattcgtgaaaactctggtgctctgggatgagtctgca

SEQ ID NO: 1277 - DNA, 225 bp, Unknown
  Encodes 16S rRNA from unknown taxa
agagtttgatcatggctcaggatgaacgctggcggcgtgcttcatacatgcaagtcgaacgagaaatgatagcttgctatcatggaaagtggcggacgggtgagtaatacatagggaatctgcccttagccgggggacaacagttggaaacgactgctaataccgcatatgagtatagttttatacttgaaaactccggtggctaaggatgagcctgtgcctgat

SEQ ID NO: 1278 - DNA, 225 bp, Unknown
  Encodes 16S rRNA from Prevotella
agagtttgatcatggctcaggatgaacgctagctacaggcttaacacatgcaagtcgaggggcagcatgtcagtggcttgccactgatgatggcgaccggcgcacgggtgagtaacgcgtatccaaccttcccccaagtagggaatagcccggcgaaagtcggattaatgccctatgttttccttatgtgagcattctgtgaggaacaaagattgatcgcttggg

SEQ ID NO: 1279 - DNA, 225 bp, Unknown
  Encodes 16S rRNA from Slackia
agagtttgatcctggctcaggatgaacgctggcggcgtgcctaacacatgcaagtcgaacggagaagccgccctcgggcgggtatgaagtggcgaacgggtgagtaacacgtgaccaacctgccccgcgcaccgggacaaccccccgaaaggggggctgataccggatacgcccccggcgccgcatggcggcggggggaaagcccagacggcgcgggatggggtc

SEQ ID NO: 1280 - DNA, 225 bp, Unknown
  Encodes 16S rRNA from Pedobacter
agagtttgatcatggctcaggatgaacgctagcggcaggcttaacacatgcaagtcgaggggcatcgcgggagtagcaatacacctggcggcgaccggcggaagggtgcgtaacgcgtgagcaacatgcccgtcacagggggataacagatggaaacgtctcctaataccccgtaacatcatctgcggcatcgcaggtggttgaaagtttcggcggtgacggatt

SEQ ID NO: 1281 - DNA, 225 bp, Unknown
  Encodes 16S rRNA from Prevotella
agagtttgatcctggctcaggatgaacgctagctacaggcttaacacatgcaagtcgaggggcagcacggttgttgcttgcaacaactggtggcgaccggcgcacgggtgagtaacgcgtatccaacctgcccgcaaccgcggaatagcccgccgaaaggcggattaatgccgcatgagctcgcgcgagggcatcatttcgcgagcaaaggttcactccggttgc

SEQ ID NO: 1282 - DNA, 225 bp, Unknown
  Encodes 16S rRNA from Trueperella
agagtttgatcatggctcaggacgaacgctggcggcgtgcttaacacatgcaagtcgaacgatgaagctggtgcttgcactggtggattagtggcgaacgggtgagtaatacgtgagtaacctgcccttgtctttgggataagcctgggaaactgggtctaatactggatattctgcgctggccgcatggttggtgttggaaagggttatggactggatggggat

SEQ ID NO: 1283 - DNA, 225 bp, Unknown
  Encodes 16S rRNA from Oscillibacter
agagtttgatcatggctcaggataaacgctggcggcgcacataagacatgcaagtcgaacggaagtcgtaattaaaaaggaacaaagatttatcggagtgagattttaactacaatggctttagtggcggactggtgagtaatgtataagtaacctgcctattagaggggaacaacagttggaaacagctgctaataccgcatatgccataagaaccgcatggtt

SEQ ID NO: 1284 - DNA, 225 bp, Unknown
  Encodes 16S rRNA from unknown taxa
agagtttgatcatggctcaggatgaacgctggcggcgtgcttcatacatgcaagtcgaacgagaattggtagcttgctaccaaggaaagtggcggacgggtgagtaatacatagggaatctgcccttagctgggggacaacagttggaaacgactgctaataccgcatatgagtatagttgagatattatacttgaaaactccggtggctagggatgagcctgtg

SEQ ID NO: 1285 - DNA, 225 bp, Unknown
  Encodes 16S rRNA from Victivallis
agagtttgatcatggctcagaatgaacgctggcggcatggattaggcatgcaagtcgaacggggtccttcgggacctagtggcgaaagggtgagtaacacgtgagcaatctgcccccaaggccggaataagcactggaaacggtgtctaaaaccggatgaggcctggagtcgcatgactcctcagccaaatattcataccctggggatgagctcgcggcccatta

SEQ ID NO: 1286 - DNA, 225 bp, Unknown
  Encodes 16S rRNA from Bacteroides
agagtttgatcatggctcaggatgaacgctagcggcaggcttaacacatgcaagtcgaggggcagcggagaagtagcaatacttctgccggcgaccggcgcacgggtgagtaacgcgtatgcaacctttcccagacagggggatagcccagggaaacttggattaataccccgtaggccgtggggcggcatcgccctatggttaaagttccggcggtctggggtg

SEQ ID NO: 1287 - DNA, 225 bp, Unknown
  Encodes 16S rRNA from Micrococcus
agagtttgatcatggctcaggatgaacgctggcggcgtgcttaacacatgcaagtcgaacgatgaagcccagcttgctgggtggattagtggcgaacgggtgagtaacacgtgagtaacctgcccttaactctgggataagcctgggaaactgggtctaataccggataggagcgcctaccgcatggtgggtgttggaaagatttatcggttttggatggactcg

SEQ ID NO: 1288 - DNA, 225 bp, Unknown
  Encodes 16S rRNA from Olivibacter
agagtttgatcatggctcaggatgaacgctagcggcaggcctaatacatgcaagtcgtacggtaagcggtccttcgggaccgtgagagtggcggacgggtgcgtaacgcgtatgcaaccaacccccctcgccgggatagccggtggaaacgccggataataccggatgcgccgcgggggaggcatcttcccggcggcaaggcggagacgcggagggggacgggca

SEQ ID NO: 1289 - DNA, 225 bp, Unknown
  Encodes 16S rRNA from Anaerophaga
agagtttgatcatggctcaggatgaacgctagcgacaggcctaacacatgcaagtcgaggggtaacagggagcttgctccgctgacgaccggcgcacgggtgagtaacgcgtatgcaacctgcccgcgggatcgggatagccccccgaaagggggattaacaccggatgaggctgcgagggggcatccccatgtagccaaatgcgaagctcgcggatgggcatgc

SEQ ID NO: 1290 - DNA, 225 bp, Unknown
  Encodes 16S rRNA from Selenomonas
agagtttgatcatggctcaggacgaacgctggcggcgtgcttaacacatgcaagtcgaacggggcgattgaaagcttgcttttatgagcctagtggcaaacgggtgagtaacgcgtgggcaacctgccggaaagatggggacaacatcccgaaaggggtgctaataccgaatgttgtatacggggcgcatgccttgtatattaaaggattttatccgctttccga

SEQ ID NO: 1291 - DNA, 151 bp, Unknown
  Encodes 16S rRNA from Megasphaera
agagtttgatcctggctcagattgaacgctggcggcaggcttaacacatgcaagtcgtacggtaacagagggaagcttgcttctctgctgacgagtgacggtaccgaacatagaaagccacggctaactacgtgccagcagccgcggtaat

SEQ ID NO: 1292 - DNA, 225 bp, Unknown
  Encodes 16S rRNA from Clostridium XlVa
agagtttgatcctggctcaggatgaacgctggcggcgtgcctaacacatgcaagtcgaacgaagcacacggattgatcccttcggggtgattgaagtatgactgagtggcggacgggtgagtaacgcgtgggtaacctgcctcatacagggggataacagttagaaatgactgctaataccgcataagcgcacagcatcgcatggtgcagtgtgaaaaactccgg

SEQ ID NO: 1293 - DNA, 225 bp, Unknown
  Encodes 16S rRNA from Clostridium XlVa
agagtttgatcatggctcaggatgaacgctggcggcgtgcctaacacatgcaagtcgaacggggtacagacgctgtgagaagaagtgcttgcacggaatcaaacttgtttgtacttagtggcggacgggtgagtaacgcgtggaaaacctgcctcatacagggggataacaggaagaaattcctgctaataccgcataagcgcacaggaaggcatctttcagtgt

SEQ ID NO: 1294 - DNA, 225 bp, Unknown
  Encodes 16S rRNA from Eubacterium
agagtttgatcatggctcaggatgaacgctggcggcgtgcttaacacatgcaagtcgagcgagaaatcgctcagttgatacttcggttgaaaacagagcgacggaaagcggcggacgggtgagtaacgcgtgggaaacctgccctttacagggggacagccgagggaaacttcgattaataccccataatgccatagtatcgcatggtaccatggccaaagattt

SEQ ID NO: 1295 - DNA, 225 bp, Unknown
  Encodes 16S rRNA from unknown taxa
agagtttgatcatggctcaggatgaacgctggcggcgtgcttcatacatgcaagtcgaacgagaattgatagcttgctatcaaggaaagtggcggacgggtgagtaatacatagggaatctgcccttagctgggggacaacagttggaaacgactgctaataccgcatatgagtatgattgagatattatacttgaaaactccggtggctaaggatgagcctgtg

SEQ ID NO: 1296 - DNA, 225 bp, Unknown
  Encodes 16S rRNA from Clostridium XlVa
agagtttgatcatggctcaggatgaacgctggcggcgtgcctaacacatgcaagtcgaacggaaatgttttgatgaagatttcggttggattcaatacattttagtggcggacgggtgagtaacacgtgggtaacctgccctgtaccgggggataacacttagaaataggtgataataccgcataagcgcacactgaggcatctcagagtgtgaaaaactccggt

SEQ ID NO: 1297 - DNA, 225 bp, Unknown
  Encodes 16S rRNA from Treponema
agagtttgatcctggctcagaacgaacgctggcggcgcgtcttaagcatgcaagtcgagcgggattacctagcttgctaggtatgagagcggcggactggtgagtaacgcgtgggtgacgtacccttctgacggggatagccggtagaaataccgggtaataccggatgcgttctcctgtcttggaagcaggagaagaaaggagctacggctccgcaggaggaac

SEQ ID NO: 1298 - DNA, 225 bp, Unknown
  Encodes 16S rRNA from Cryptanaerobacter
agagtttgatcatggctcaggacgaacgctggcggcatgcctaacacatgcaagtcgaacggaataagaatggctgtagcgatactttcgttcttatttagtggcgaacgggtgagtaacacgtgagcaacctgccttctacacagggataacagccggaaacggctgctaataccggataagaccacactgaggcatctcagaggggtcaaagcgatttagcgg

SEQ ID NO: 1299 - DNA, 225 bp, Unknown
  Encodes 16S rRNA from Xanthomonas
agagtttgatcctggctcagagtgaacgctggcggcaggcctaacacatgcaagtcgaacggcagcacaggagagcttgctctctgggtggcgagtggcggacgggtgaggaatacatcggaatctaccttgtcgtgggggataacgtagggaaacttacgctaataccgcatacgacctacgggtgaaagcaggggaccttcgggccttgcgcgattggatgag

SEQ ID NO: 1300 - DNA, 225 bp, Unknown
  Encodes 16S rRNA from Asteroleplasma
agagtttgatcatggctcaggataaacgccggcggcgtgcctaatacatgcaagtcgaacgggagtagcaatactctagtggcgtacgggtgagtaacacgttggtaacctaccccaaggaccggaataccaaggagaaatctttgctaatgccggatgaaaccatagaagcgcaagcttcattgatcaaaggcggcaattgccgcgccatgggatggacctgcg

SEQ ID NO: 1301 - DNA, 225 bp, Unknown
  Encodes 16S rRNA from unknown taxa
agagtttgatcatggctcaggatgaacgctggcggcgtgcttcatacatgcaagtcgaacgagaattggtagcttgctaccaaggaaagtggcggacgggtgagtaatacatagggaatctgcccttagccgggggacaacagttggaaacgactgctaataccgcatatgaggtaagttgagatacttatcttgaaaactccggtggctaaggatgagcctgtg

SEQ ID NO: 1302 - DNA, 225 bp, Unknown
  Encodes 16S rRNA from Sporotomaculum
agagtttgatcctggctcaggacgaacgctggcggcgtgcttaacacatgcaagtcgaacgaggaatgttgaaaagcttgctttttgacatttcgagtggcggacgggtgagtaacgcgtgaggaacctgtcttctacagggggataacgtcccgaaagggacgctaataccgcataagaccacagtatcgcatgatacaggggtcaaaggagcaatccggtaga

SEQ ID NO: 1303 - DNA, 225 bp, Unknown
  Encodes 16S rRNA from Bacteroides
agagtttgatcatggctcaggatgaacgctagcgacaggcctaacacatgcaagtcgaggggcagcatggttggtagcaataccgactgatggcgaccggcgcacgggtgcgtaacaggtgtgcaatctgtcctataccaagggatagcccgctgaaaggcggattaaaactttatgtgtcatatggaggcatctctgtgtgatgaaacgcgagggtataggatg

SEQ ID NO: 1304 - DNA, 225 bp, Unknown
  Encodes 16S rRNA from Asaccharobacter
agagtttgatcatggctcaggatgaacgctggcggcgtgcttaacacatgcaagtcgaacgattaacccgccttcgggcggtcatagagtggcgaacgggtgagtaacacgtgaccaacctgccccgcgcaccgggacagcctcgcgaaagcgggattaataccggatactccgggggcgccgcatggcgcccccgggaaagctccggcggcgcgggatggggtc

SEQ ID NO: 1305 - DNA, 225 bp, Unknown
  Encodes 16S rRNA from Clostridium IV
agagtttgatcatggctcaggacgaacgctggcggtatgcctaacacatgcaagtcgaacgagtgtcgaagagcttgctcttcttctactagtggcggacgggtgagtaacgcgtgagtaatctgcctcaaagtgggggataacacttagaaatgagtgctaataccgcgtaatgtgctagcttcgcatgaagtctgcaccatagtttttcgctttgagatgagc

SEQ ID NO: 1306 - DNA, 225 bp, Unknown
  Encodes 16S rRNA from unknown taxa
agagtttgatcatggctcaggacgaacgctggcggcgtgcttcatacatgcaagtcgaacgagaaactgacttcggttagtggaaagtggcggacgggtgagtaatgtgtagagaatctgccctggagagtgggacaacagttggaaacgactgctaataccgcatatgagcgtacctgcaatggtattcttgaaatgaattatcgctccgggatgagtctgcat

SEQ ID NO: 1307 - DNA, 225 bp, Unknown
  Encodes 16S rRNA from Clostridium XlVa
agagtttgatcctggctcaggatgaacgctggcggcgtgcttaatacatgcaagtcgaacgagcagagatattcgtatcgaagcgagtggcggacgggtgagtaacgcgtgggaaacctgccctataccgggggataacagttggaaacgactgctaataccgcataagcgcacggagttgcatgactctgtgtgaaaaactccggtggtataggatggtcccgc

SEQ ID NO: 1308 - DNA, 225 bp, Unknown
  Encodes 16S rRNA from Treponema
agagtttgatcatggctcagaacgaacgctggcggcgcgtcttaagcatgcaagtcgaacggcaagctagacttcggtttagcctagagtggcggactggtgagtaacgcgtagatgacgtaccttaaggatggggatagccgatagaaatatcgggtaataccgaatacggtcactgctgttagagggcagtgaggaaagcagctatggctgcgccttaagaac

SEQ ID NO: 1309 - DNA, 225 bp, Unknown
  Encodes 16S rRNA from Prevotella
agagtttgatcctggctcaggatgaacgctagctacaggcttaacacatgcaagtcgaggggcagcgggggcgtagcaatacgcctgccggcgaccggcgcacgggtgagtaacgcgtatccaacctcccccccagtaggggatagcccggcgaaagtcggattaataccctatgtcgtccaggacgggcatcttttccggacgaaagattgatcgctgggggat

SEQ ID NO: 1310 - DNA, 225 bp, Unknown
  Encodes 16S rRNA from Turicibacter
agagtttgatcatggctcaggatgaacgctggcggtatgcttaatacatgcaagtcgagcgagatcttcggatcgagcggcgaacgggtgagtaacacgtaggtaatctgccctttagactgggataccctgaggaaacttaggctaataccggatatgaacttcgaaggcatctttgaagtttgaaagttccgtttggaacactttgggatgaacctgcggcgc

SEQ ID NO: 1311 - DNA, 225 bp, Unknown
  Encodes 16S rRNA from Clostridium IV
agagtttgatcatggctcaggacgaacgctggcggcgtgcctaacacatgcaagtcgaacggagttattagagtgaagttttcggatggagcgaagataacttagtggcggacgggtgagtaacgcgtgagtaacctgcccattagagggggataacgttctgaaaagaacgctaataccgcataacatattcggttcgcatgaactgaatatcaaaggagtaat

SEQ ID NO: 1312 - DNA, 225 bp, Unknown
  Encodes 16S rRNA from Clostridium IV
agagtttgatcatggctcaggatgaacgctggcggcgtgcataacacattcaagtcgaacggactgattttgtagcttgctacgaatgaaagttagtggcggacgggtgagtaacgcgtgagcaacctgcctctgtgtgtgggataccgtctggaaacggacgttaataccgcatgatccatagagatcgcatgatatttatggcaaagatttattgcacagaga

SEQ ID NO: 1313 - DNA, 225 bp, Unknown
  Encodes 16S rRNA from Clostridium IV
agagtttgatcatggctcaggacaaacgctggcggcgtgcttaacacatgcaagtcgaacggagtacccgagaaagaagcttcggcagattgatcggaatacttagtggcggacgggtgagtaacacgtgagtaacctgcccttgagtgggggataacactccgaaaggagtgctaataccgcataacatggatatgttgcatggcaaatccatcaaagatttat

SEQ ID NO: 1314 - DNA, 225 bp, Unknown
  Encodes 16S rRNA from Oscillibacter
agagtttgatcctggctcaggacgaacgctggcggcgtgcttaacacatgcaagtcgaacgaagctctcacactcgagttttcggacaagagagtgagatgacttagtggcggactggtgagtaacgcgtgagcaacctgccctccggtgggggacaacagctggaaacggctgctaataccgcataatgtgtacggaccgcatgatctgtacaccaaagcttta

SEQ ID NO: 1315 - DNA, 225 bp, Unknown
  Encodes 16S rRNA from Deinococcus
agagtttgatcatggctcagggtgaacgctggcggcgtgcttaagacatgcaagtagaacggtcttttcggagacagtggcgcacgggtgagtaacacgtaactgacctgccccaaagtcgcggataactgggtgaaagtccagctaatacgtgatgtgctgtcagattttgttctgccagtaaaggtttactgctttgggatggggttgcgttccatcagctag

SEQ ID NO: 1316 - DNA, 225 bp, Unknown
  Encodes 16S rRNA from Pedobacter
agagtttgatcatggctcaggatgaacgctagcggcaggcctaatacatgcaagtcgaacggtaaatgtcccttcggggacatgagagtggcggacgggtgcgtaacgcgtatgcaaccaacccccctcaccgggatagccggtggaaacgccggataacaccggatgcgcccatggggaggcatctccctgcgggcaaggcggcgacgcggagggggacgggca

SEQ ID NO: 1317 - DNA, 225 bp, Unknown
  Encodes 16S rRNA from Anaerovorax
agagtttgatcctggctcaggatgaacgctggcggcgtgcctaacacatgcaagtcgagcgggaatgtccggaatgaaacttcggtcgaatgaagggcaggacagcggcggacgggtgagtaacgcgtaggtaagctgccccttgcacagggatagcctcgggaaactgggattaatacctgataaagcgcagacagcacatgctgactgcgccaaagatttatc

SEQ ID NO: 1318 - DNA, 225 bp, Unknown
  Encodes 16S rRNA from Clostridium IV
agagtttgatcatggctcaggacgaacgctggcggcgtgcctaacacatgcaagtcgaacggacttagctgagtgcttgcactcggcgacagttagtggcggacgggtgagtaacgcgtgaataacctgcccaacagagggggataacgtttggaaacgaacgctaataccgcataacattggagcatcgcatggtgttctaatcaaaggagcaatccgctgatg

SEQ ID NO: 1319 - DNA, 225 bp, Unknown
  Encodes 16S rRNA from Bacteroides
agagtttgatcctggctcaggatgaacgctagctacaggcctaacacatgcaagtcgaggggcagcgcgggtagcaatacctggcggcgaccggcgcacgggtgcgtaacaggtgtgcaatctgtcctataccgggggatagcccggcgaaagccgaattaaaactccatgtgtcacgaagccgcatgactttgtgatgaaacgttatagggtatagggtgagca

SEQ ID NO: 1320 - DNA, 225 bp, Unknown
  Encodes 16S rRNA from Clostridium IV
agagtttgatcatggctcaggatgaacgctggcggcgtgcataacacattcaagtcgaacgaagcactgtcgaggaagtcttcggatggaattgactttgacttagtggcggacgggtgagtaacgcgtgagcaaccttcctgtttgtgagggataacacagggaaacttgtgctaataccgcatgatgcatgggaatcgcatggtttcgatgccaaagatttat

SEQ ID NO: 1321 - DNA, 225 bp, Unknown
  Encodes 16S rRNA from Rhodococcus
agagtttgatcatggctcaggacgaacgctggcggcgtgcttaacacatgcaagtcgaacggtaaggccccttcgggggtacacgagtggcgaacgggtgagtaacacgtgggtgatctgccctgcactctgggataagcctgggaaactgggtctaataccggatatgagctcctgtcgcatggcgggggttggaaaggtttactggtgcaggatgggcccgcg

SEQ ID NO: 1322 - DNA, 225 bp, Unknown
  Encodes 16S rRNA from Treponema
agagtttgatcatggctcagaacgaacgctggcggcgcgtcttaagcatgcaagtcggacggcaagatcggtgcttgcactgatcctagagtggcggactggtgagtaacgcgtgggtgacgtaccctccggacggggatagctactagaaatagtagataataccggatacggtgcactgtgtcagaggcagtgcaggaaaggttcttttgaaccgccggagga

SEQ ID NO: 1323 - DNA, 225 bp, Unknown
  Encodes 16S rRNA from Mucilaginibacter
agagtttgatcatggctcaggatgaacgctagcggcaggcctaatacatgcaagtcggacgggatctccccttcgggggagtgagagtggcgcacgggtgcgtaacgcgtatgcaaccaaccctcatccgggggacagccggtggaaacgccgggtaataccccataccgattcctgtgggcatccacggggattgaaagacttaggtcggaggaggacgggcat

SEQ ID NO: 1324 - DNA, 225 bp, Unknown
  Encodes 16S rRNA from Clostridium XlVa
agagtttgatcatggctcaggatgaacgctggcggcgtgcctaacacatgcaagtcgaacggtgatgagcagaaattttcggatggaagcttatcatagtggcggacgggtgagtaacgcgtggataacctgcctcttgctgggggatagcagccggaaacggctggtaataccgcatacgttcatttccccgcatggggaggtgaggaaagatttatcggcgag

SEQ ID NO: 1325 - DNA, 225 bp, Unknown
  Encodes 16S rRNA from Olivibacter
agagtttgatcctggctcaggatgaacgctagcggcaggcctaatacatgcaagtcggacgggatctccccttcgggggagtgagagtggcgcacgggtgcgtaacgcgtatgcaaccaaccctcatccgggggacagccggtggaaacgccgggtaataccccatatccactttgggaggcatcttctgaggtggaaagacttaggtcggaggaggacgggcat

SEQ ID NO: 1326 - DNA, 225 bp, Unknown
  Encodes 16S rRNA from Clostridium XlVa
agagtttgatcatggctcaggatgaacgctggcggcacgcttaacacatgcaagtcgaacgaggttatgaacttcggttaataacctagtggcggacgggtgcgtaacgcgtgggtaatctgcccttgacagggggataacgtatagaaatgtacgctaataccgcataagcccacggagaggcatctctctgagggaaaagggatactggtcaaggatgagccc

SEQ ID NO: 1327 - DNA, 225 bp, Unknown
  Encodes 16S rRNA from Barnesiella
agagtttgatcatggctcaggatgaacgctagcgacaggcctaacacatgcaagtcgaggggcagcatggagtagcaatactctgatggcgaccggcgcacgggtgcgtaacaggtgtgcaatctgtcctataccgggggatagcccggcgaaagccgaattaaaactccatgtgagcgattggcgcatgccagtctcttgaaacgtttagggtatagggtgagc

SEQ ID NO: 1328 - DNA, 225 bp, Unknown
  Encodes 16S rRNA from Clostridium XlVb
agagtttgatcatggctcaggatgaacgctggcggcgtgcctaacacatgcaagtcgagcgaagaattgagagcttgctcttaattacttagcggcggacgggtgagtaacgcgtgggtaacctgccctgtacaggggaataacagttagaaatgactgctaatgccccataagccgacgaaatggcatctttatgtcggaaaagatttatcggtacaggaggga

SEQ ID NO: 1329 - DNA, 225 bp, Unknown
  Encodes 16S rRNA from Gelidibacter
agagtttgatcctggctcaggataaacgctagcggcaggcctaacacatgcaagtcgagcggcagcgggagtggcaacacttgccggcgagcggcggacgggtgagtaacgcgtatgcaacctgcccatcacacggagatagccgaccgaaaggacgattaaactccgatggcatcaagagggggcatccccatttgattaaatattcataggtgatggatgggc

SEQ ID NO: 1330 - DNA, 225 bp, Unknown
  Encodes 16S rRNA from Methanobrevibacter
agagtttgatcatggctcaggacgaacgctggcggcgtgcctaacacatgcaagtcgaacgaatttagattcgtggcgtacggctcagtaacacgtggataacctacccttaggactgggataactctgggaaactggggctaataccggatagatgatttttcttggaatgggattttgtttaaatgttttttcgcctaaggatgggtctgcggcagattaggt

SEQ ID NO: 1331 - DNA, 225 bp, Unknown
  Encodes 16S rRNA from Anaerotruncus
agagtttgatcatggctcaggacgaacgctggcggcgtgcctaacacatgcaagtcgaacggagtttactttttagatttcttcggaatgacgagttgtaaacttagtggcggacgggtgagtaacgcgtgagcaacctgcctttcagagggggacaacagttggaaacgactgctaataccgcataatattaggtttagacatctttacctaatcaaaggagca

SEQ ID NO: 1332 - DNA, 225 bp, Unknown
  Encodes 16S rRNA from Lachnospiracea incertae sedis
agagtttgatcatggctcaggatgaacgctagctacaggcttaacacatgcaagtcgaacgaggcgaggagtgcttgcacaccgaacctagtggcggacgggtgcgtaacgcgtgggtaacctgccctaaacagggggataacgtatagaaatgtacgctaataccgcataagctcacggaaccgcatggttttgagggaaaaggatttccggtttaggatgggc

SEQ ID NO: 1333 - DNA, 225 bp, Unknown
  Encodes 16S rRNA from Erysipelotrichaceae incertae sedis
agagtttgatcatggctcaggatgaacgctggcggcatgcctaagacatgcaagtcgtacgaggtggcccattgaaatggagtgcttgcacaaagtggatttggattcccacctagtggcggaagggtgagtaacacgtaggtaatctaccttagagactgggataacaattagaaatgattgctaataccggatgataattatgaggtaaacttgtaatttaaa

SEQ ID NO: 1334 - DNA, 225 bp, Unknown
  Encodes 16S rRNA from Mesorhizobium
agagtttgatcatggctcagaacgaacgctggcggcaggcttaacacatgcaagtcgaacgccccgcaaggggagtggcagacgggtgagtaacgcgtgggaatctacccatcactacggaacaactccgggaaactggagctaataccgtatacgtccttcgggagaaagatttatcggtgatggatgagcccgcgttggattagctagttggtggggtaatgg

SEQ ID NO: 1335 - DNA, 225 bp, Unknown
  Encodes 16S rRNA from Clostridium XI
agagtttgatcatggctcaggacgaacgctggcggcgtgcctaacacatgcaagtcgagcggggatttagtggaaggaagcttcggcggacggaaggtaaatcttagcggcggacgggtgagtaacgcgtgaacaatctgtcccggacagggggataacacatggaaacaggtgctaataccgcataagaccacagcgtcgcatggcggtggggtaaaaggagga

SEQ ID NO: 1336 - DNA, 225 bp, Unknown
  Encodes 16S rRNA from Planctomyces
agagtttgatcatggctcagaatgaacgttggtagcgtggattaggcatgcaagtcgagcgacaaggtttcttcggaaactggaggagcggcaaacggggtaggataacatcggaacgtaccctcttgtccgggatacccgcgggaaactgcggttaataccggataatcccgaaagggcaaaggtccgccgcgggaggagcggccgatgtgatatcagctagtt

SEQ ID NO: 1337 - DNA, 225 bp, Unknown
  Encodes 16S rRNA from Aerococcus
agagtttgatcctggctcaggacgaacgctggcggcatgcctaatacatgcaagtcgagcgaacagatgaagtgcttgcacttctgacgttagcggcgaacgggtgagtaacacgtaaggaatctacctataagcgggggataacattcggaaacgggtgctaataccgcataatatcttcttccgcatggaagaagattgaaagacggctctgctgtcacttat

SEQ ID NO: 1338 - DNA, 225 bp, Unknown
  Encodes 16S rRNA from Victivallis
agagtttgatcatggctcagaacgaacgctggcggcatggattaggcatgcaagtcgaacggtgcagcaatgcatagtggcgcaagggtgaggaacgcgtgagtaatctgccctcaagttgggaacagcttctggaaacggaaattaataccgaatgtgaccattggaaggcatctttcagtggttaaaggccgcaaggtcgcttgaggaggggctcgcgtccca

SEQ ID NO: 1339 - DNA, 225 bp, Unknown
  Encodes 16S rRNA from unknown taxa
agagtttgatcctggctcaggacgaacgctggcggcgtgcttcatacatgcaagtcgaacgagaatcaggagcttgcttctgaggaaagtggcggacgggtgagtaatatgtagagaatctgcccttaagcgggggacaacagttggaaacgactgctaataccccatatgcgcgtagttgcgatactattcgtgaaaactccggtgcttaaggatgagtctgca

SEQ ID NO: 1340 - DNA, 225 bp, Unknown
  Encodes 16S rRNA from Bacteroides
agagtttgatcctggctcaggatgaacgctagctacaggcttaacacatgcaagtcgcggggtatcgcggtgagtagcaatactttctggcggcgaccggcggatgggtgagtaacgcgtatccaacctggccctatctcggggacagcccctcgaaagagggattaatacccgatgttccctggtttccgcatgtttaccagggcaaaggcttttgtcggatag

SEQ ID NO: 1341 - DNA, 225 bp, Unknown
  Encodes 16S rRNA from Clostridium XI
agagtttgatcatggctcaggatgaacgctggcggcgtgcctaacacatgcaagtcgagcgagaagttgctgacggagatttcggtcaacagaagcgatggatagcggcggacgggtgagtaacgcgtaggtaagctgccccgcacacaggaatagcctagggaaacctggattaatgcctgatgacgcggcggagtcacatggctctgtcgccaaagatttatc

SEQ ID NO: 1342 - DNA, 225 bp, Unknown
  Encodes 16S rRNA from Clostridium XlVa
agagtttgatcctggctcaggatgaacgctggcggcgtgcctaacacatgcaagtcgaacgaagaccccgaagcggagatttcggttgaagcagagggaggactgagtggcggacgggtgagtaacgcgtggataacctgccccatacagggggatagcagttggaaacgactgataataccgcatgagcgcacgtggagacatctccatgtgtgaaaagattta

SEQ ID NO: 1343 - DNA, 200 bp, Unknown
  Encodes 16S rRNA from Ruminococcus
agagtttgatcatggctcagattgaacgctggcggcaggcttaacacatgcaagtcgtacggtaacggagggaactctgatgcagcgatgccgcgtggaggaagaaggttttcggattgtaaactcctgtttcgagggacgataatgacggtacctcgggaggaagctccggctaactacgtgccagcagccgcggtaat

SEQ ID NO: 1344 - DNA, 225 bp, Unknown
  Encodes 16S rRNA from Saccharofermentans
agagtttgatcatggctcaggatgaacgctggcggcgtgcctaacacattcaagtcgaacggagaagaaggcttcggccttcggatcagtggcggacgggtgagtaacgcgtgagtaatctgcctttgattggggaataacacagggaaacctgtgctaataccgcataacacagcgacaccgcatgatgatgctgtcaaagaattatcgatcaaagatgagctc

SEQ ID NO: 1345 - DNA, 225 bp, Unknown
  Encodes 16S rRNA from Oscillibacter
agagtttgatcctggctcaggacgaacgctggcggcgtgcctaacacatgcaagtcgaacgaagctcttttcaatgcgattcgtcaagttgaaaggatgacttagtggcgaacgggtgagtaacgcgtgagcaacctgccccggagtgggggacaacagttggaaacgactgctaataccgcatgatatatactaacggcatcgttggtatatcaaagatttatt

SEQ ID NO: 1346 - DNA, 225 bp, Unknown
  Encodes 16S rRNA from Lachnospiracea incertae sedis
agagtttgatcatggctcaggatgaacgctggcggcgtgcttaacacatgcaagtcgaacgaagcaccctcacctcgatactgaatgcgagcttgctcaaatgacgtatcacccgagggtgactgagtggcggacgggtgagtaacgcgtgggtaacctgccttagacagggggataacaacaagaaattgttgctaataccgcataagcacacagcatcgcatg

SEQ ID NO: 1347 - DNA, 207 bp, Unknown
  Encodes 16S rRNA from Fibrobacter
agagtttgatcctggctcaggatgaacgctagctacaggcttaacacatgcaaatgggggaaaccctgatgcagcaacgccacgtgtgggaagaagcatttcggtgtgtaaaccactgtcgtgagggaataatacgcgtcttcgggcgcgggagaatgtacctcgaaaggaagcaccggcaaacttcgtgccagcagccgcggtaat

SEQ ID NO: 1348 - DNA, 225 bp, Unknown
  Encodes 16S rRNA from Kiloniella
agagtttgatcctggctcagaacgaacgctggcggcaggcttaacacatgcaagtcaagggggtgtagcaatacacaaccggcgcacgggtgagtaacgcgtgggaatatgtccatttgtggggaatagcttctggaaacggaaggtaataccgcatacgcccttcgggggaaagatttatcgcagatggagtggcccgcgttagattagctagttggtgaggta

SEQ ID NO: 1349 - DNA, 225 bp, Unknown
  Encodes 16S rRNA from Olivibacter
agagtttgatcatggctcaggatgaacgctagcggcaggcttaacacatgcaagtcgaggggcagcgcgttgtagcaatacaatggcggcgaccggcggaagggtgcgtaacgcgtgagcaacctgcccctgtcagggggatagtcgatggaaacgtcgcgtaataccccgtacgatgcggagtcgcatgattctgcattaaaagatttatcggacagggatggg

SEQ ID NO: 1350 - DNA, 225 bp, Unknown
  Encodes 16S rRNA from Clostridium IV
agagtttgatcatggctcaggatgaacgctggcggcgtgcataacacattcaagtcgaacgaagcaccggcgaggaagtcttcggatggaattgcccttgacttagtggcggacgggtgagtaacgcgtgagcaaccttcctgcttgtgagggataacacagggaaacttgtgctaataccgcatgacgcacgattgtcgcatggcagatgtgccaaagatttat

SEQ ID NO: 1351 - DNA, 225 bp, Unknown
  Encodes 16S rRNA from Spirochaeta
agagtttgatcctggctcagaacgaacgctggcggcgcgttttaagcatgcaagtcgagcggtaagccggagcaatccggcctagagcggcggacgggtgagtaacacgtggataatctggcctacagtttgggatagcctggtgaaagtcaggataataccggatacgacggtttggtcacaagagcgaatcgggaaaggggctaaggcctcgctgaaggatga

SEQ ID NO: 1352 - DNA, 225 bp, Unknown
  Encodes 16S rRNA from Prevotella
agagtttgatcatggctcaggatgaacgctagctacaggcttaacacatgcaagtcgaggggcagcatgtcgtgtgcttgcacgcgatgatggcgaccggcgcacgggtgagtaacgcgtatccaacctgcccatgaccccgggatagcccgctgaaaagcggattaacaccggatgcggtcgaaagaggacatctgatttcgaccaaagcttcggcggtcatgg

SEQ ID NO: 1353 - DNA, 225 bp, Unknown
  Encodes 16S rRNA from Olivibacter
agagtttgatcctggctcaggatgaacgctagcggcaggcctaatacatgcaagtcgaacggtaaacgccccttcgggggtgtgagagtggcgcacgggtgcgtaacgcgtatgcaacccacccgctgccgggggatagcccggagaaatccgaattaataccccatgaggagtaaccaaggcatcttggttatttcaaaacttcggtggcggcggacgggcatg

SEQ ID NO: 1354 - DNA, 225 bp, Unknown
  Encodes 16S rRNA from Prevotella
agagtttgatcatggctcaggatgaacgctagctacaggcttaacacatgcaagtcgaggggcatcaggtatcaagcttgcttgatatgctggcgaccggcgcacgggtgcgtaacacgtatcgaaccttcccgcctctccgggacagccctctgaaaggaggattaataccggatggcttcgcggagccgcatggctctgcgaataaagatttatcggagacgg

SEQ ID NO: 1355 - DNA, 225 bp, Unknown
  Encodes 16S rRNA from Parabacteroides
agagtttgatcatggctcaggatgaacgctagcgacaggcttaacacatgcaagtcgaggggcagcgggggcgatggcaacattgcccgccggcgaccggcgcactggtgagtaacacgtatgcaacctgccccgcacagggggataacccagagaaatttggcctaataccccgtaacaccgttgggggcatccccggtggttgaaagaggcgactcggtgcgg

SEQ ID NO: 1356 - DNA, 225 bp, Unknown
  Encodes 16S rRNA from Prevotella
agagtttgatcctggctcaggatgaacgctagctacaggcttaacacatgcaagtcgcggggcagcatggaggttgcttgcaacctctgatggcgaccggcgcacgggtgagtaacgcgtatccaacctgccctgcggtagggaacagcccggcgaaagtcggattaatgccctatgtgctcatttgaaggcatctgattttgagcaaaggattcgttcgccgca

SEQ ID NO: 1357 - DNA, 225 bp, Unknown
  Encodes 16S rRNA from Leifsonia
agagtttgatcctggctcaggacgaacgctggcggcgtgcttaacacatgcaagtcgaacggtgaacgagggagcttgcttcctccggatcagtggcgaacgggtgagtaacacgtgagcaatctgccccgaactctgggataagcgttggaaacgacgtctaataccggatacgacgcgggagggcatcctctccgcgtggaaagaatttcggttcgggatgag

SEQ ID NO: 1358 - DNA, 225 bp, Unknown
  Encodes 16S rRNA from Clostridium IV
agagtttgatcctggctcaggacgaacgctggcggcgtgcttaacacatgcaagtcgaacgagaatccggggaaggagttttcggacaacggaaccggaggaaagtggcggacgggtgagtaacgcgtgaggaacctgccttggagagggggacaacagctggaaacggctgctaataccgcatgatacgtgatggggacatccctgacacgtcaaagatttatc

SEQ ID NO: 1359 - DNA, 225 bp, Unknown
  Encodes 16S rRNA from Victivallis
agagtttgatcctggctcagaacgaacgctggcggcatggattaggcatgcaagtcgaacggtgtagcaatgcacagtggcgcaagggtgaggaacgcgtgagtaatctaccctcaagttgggaacagcttctggaaacggaaattaataccgaatgtgaccgttggaaggcatcttctgatggttaaaggccgcaaggtcgcttgaggaggggctcgcgtccca

SEQ ID NO: 1360 - DNA, 225 bp, Unknown
  Encodes 16S rRNA from Treponema
agagtttgatcatggctcagaacgaacgctggcggcgcgtcttaagcatgcaagtcgaacggcaagttaccttcgggtaacctagagtggcggactggtgagtaacacgtaggtgacgtaccccccggacggggatagctcctagaaataggagataataccggataaggttgcacgggctggaaccgtgtaaggaaaggtgcttcggcaccgccgggggagcgg

SEQ ID NO: 1361 - DNA, 225 bp, Unknown
  Encodes 16S rRNA from unknown taxa
agagtttgatcatggctcaggacgaacgctggcggcgtgcttcatacatgcaagtcgaacgagaagttaccttcgggtaatggatagtggcggacgggtgagtaatgtgtagagaatctgccttcaagagggggatagcagttggaaacgactattaataccccatatgcgcgtagttggaatactattcgtgaaagattaatcgcttgaagatgagtctgcatc

SEQ ID NO: 1362 - DNA, 225 bp, Unknown
  Encodes 16S rRNA from Sporotomaculum
agagtttgatcctggctcaggacgaacgctggcggcgtgcttaacacatgcaagtcgaacgaggaatgccaaaaagcttgctttttaacatttcgagtggcggacgggtgagtaacgcgtgaggaacctgtcttctacagggggataacgtcccgaaagggacgctaataccgcataagaccacggtatcgcatgatacaggggtcaaaggagcaatccggtaga

SEQ ID NO: 1363 - DNA, 225 bp, Unknown
  Encodes 16S rRNA from Spirochaeta
agagtttgatcctggctcagaacgaacgctggcggcgcgttttaagcatgcaagttgagcggtaacttggatttattcaagctagagcggcggacgggtgagtaacacgtggataatctggcctacagttgggaatagcctgatgaaagtcaggataatgccgaatgagcagttgacggcacaagctgttgattggaaaggggctaaggcctcgctgaaggatga

SEQ ID NO: 1364 - DNA, 225 bp, Unknown
  Encodes 16S rRNA from Clostridium III
agagtttgatcctggctcaggacgaacgctggcggcgcgcctaacacatgcaagtcgaacgggactagtgaccggagagtagatgaggatctattttgcgatcactagttcagtggcggacgggtgagtaaagcatgagcaacctggctactagagggggatagcttttggaaacagaagataataccgcatacatcaaagatttcgcatgagatttttggaaaa

SEQ ID NO: 1365 - DNA, 225 bp, Unknown
  Encodes 16S rRNA from Clostridium XlVa
agagtttgatcatggctcaggatgaacgctggcggcgtgcctaacacatgcaagtcgaacgaggctctgcgaaatgaagattcgtctgattttcaaagatgtccgagtggcggatgggtgagtaacgcgtggagaacctgccctatgctgggggataacaactggaaacggttgacaataccgcataagcttccatggtcgcatgaccttggaaggaaagattta

SEQ ID NO: 1366 - DNA, 225 bp, Unknown
  Encodes 16S rRNA from Anaerovorax
agagtttgatcatggctcaggatgaacgctggcggcgtgcctaacacatgcaagtcgagcgagaattccctgaatgaaacttcggtcgaatgacgggaaggaaagcggcggacgggtgagtaacgcgtaggcaacctgccctttgcagagggatagccactggaaacggtgattaaaacctcataacacgggactgagacatctcagacccgccaaagatttatc

SEQ ID NO: 1367 - DNA, 225 bp, Unknown
  Encodes 16S rRNA from Oscillibacter
agagtttgatcatggctcaggacgaacgctggcggcgtgcttaacacatgcaagtcgaacgagtgagcgttattgcactaagttaactaatgaagttaatttagtgcaatagtgcaagctagtggcggactggtgagtaacgcgtgagcaacctacctttaacagggggataacacttagaaataggtgctaataccgcataacattaagttgtggcatcacaat

SEQ ID NO: 1368 - DNA, 225 bp, Unknown
  Encodes 16S rRNA from Victivallis
agagtttgatcatggctcagaacgaacgctggcggcatggattaggcatgcaagtcgaacgaagcagcaatgcttagtggcgaaagggtgaggaacgcgtgagtaatctgcccccaagttgggaataacagctggaaacggctgctaataccgaatgtggctgattgaccgcatggttgattggctaaagatttatcgcttggggatgagctcgcgtcccattag

SEQ ID NO: 1369 - DNA, 225 bp, Unknown
  Encodes 16S rRNA from Lachnospiracea incertae sedis
agagtttgatcctggctcaggatgaacgctggcggcgtgcttaacacatgcaagtcgaacggagtattagattttttaatacttagtggcggacgggtgagtaacgcgtgggtaacctgcctcacacagggggataacagttggaaacgactgttaataccgcataagaccacagtaccgcatggtacaggggtaaaaactccggtggtgtgagatggacccgcg

SEQ ID NO: 1370 - DNA, 225 bp, Unknown
  Encodes 16S rRNA from Spirochaeta
agagtttgatcatggctcagaacgaacgctggcggcgcgtcttaagcatgcaagtcgagcgggaaacagtagcttgctactgttgagagcggcggactggtgagtaacacgtgggtgacgcacccctgtgagggggacagccggcagaaatgccgggtaataccgcatacgattgccttaagtgatgttgaggcaatgaaaggagcgaatgctccgcgcagggag

SEQ ID NO: 1371 - DNA, 225 bp, Unknown
  Encodes 16S rRNA from Clostridium XlVb
agagtttgatcctggctcaggatgaacgctggcggcgtgcctaacacatgcaagtcgaacgagagaagcgaaaagcttgctttttgccgatcgagtggcggacgggtgagtaacgcgtgagcaacctgccttacattggggaataacgtttggaaacggacggtaataccgcatatgcagacaagtacggcatcgtacggtttggaaagatttatcgatgtaaga

SEQ ID NO: 1372 - DNA, 225 bp, Unknown
  Encodes 16S rRNA from Oscillibacter
agagtttgatcatggctcaggacgaacgctggcggcgtgcttaacacatgcaagtcgaacggggcgcagcgacggaagttttcggacggaagacgctgttgccaagtggcggacgggtgagtaacgcgtgaggaacctgcctttcagagggggacaacagttggaaacgactgctaataccgcataatgcggcgagacggcatcgtcttgccgccaaaggagcaa

SEQ ID NO: 1373 - DNA, 225 bp, Unknown
  Encodes 16S rRNA from Prevotella
agagtttgatcatggctcaggatgaacgctagctacaggcttaacacatgcaagtcgaggggcagcatggcggtggcttgccaccgccgatggcgaccggcgcacgggtgagtaacgcgtatccaacctgcccgcaaccgcggaatagcccgccgaaaggcggattaatgccgcatgagcccgcgagacggcatcagcgcgcgggcaaaggtatattccggttgt

SEQ ID NO: 1374 - DNA, 225 bp, Unknown
  Encodes 16S rRNA from Anaeroplasma
agagtttgatcctggctcaggattaacgctggcggcgtgcctaatacatgcaagtcgaatggtggtagcaatacaaaccatggcgaacgggtgagtaacacgtaggtaacctatcttaaagacgaggataaccattggaaacgatggataatactggataggacatcataaagggcatccttagatgtttaaaggagcaatccacttttagaggggcctgcggcg

SEQ ID NO: 1375 - DNA, 225 bp, Unknown
  Encodes 16S rRNA from Adlercreutzia
agagtttgatcatggctcaggatgaacgctggcggcgtgcttaacacatgcaagtcgaacggttaaaccggcttcggccggacatagagtggcgaacgggtgagtaacacgtgaccaacctgccccgcgcaccgggacagcctcgcgaaagcgggattaataccggatactccggcgggggcgcatgcccccgccgggaaagctccggcggcgcgggatggggtc

SEQ ID NO: 1376 - DNA, 225 bp, Unknown
  Encodes 16S rRNA from Clostridium XlVa
agagtttgatcatggctcaggatgaacgctggcggcgtgcttaacacatgcaagtcgaacgaagcattacgtttcaaagcctccgggcagcgagatgttttgacttagtggcggacgggtgagtaacgcgtgggtaacctgccttgtactgggggataacagttagaaatgactgctaataccgcataagcccacggtttcgcatggaactgtgagaaaagattt

SEQ ID NO: 1377 - DNA, 225 bp, Unknown
  Encodes 16S rRNA from Beijerinckia
agagtttgatcatggctcagaacgaacgctggcggcaggcttaacacatgcaagtcgaacgccccgcaaggggagtggcagacgggtgagtaacgcgtgggaatctaccgtgccctgcggaatagctccgggaaactggaattaataccgcatacgccctacgggggaaagatttatcggggtatgatgagcccgcgttggattagctagttggtggggtaaagg

SEQ ID NO: 1378 - DNA, 225 bp, Unknown
  Encodes 16S rRNA from Prevotella
agagtttgatcatggctcaggatgaacgctagctacaggcttaacacatgcaagtcgaggggcagcatgtcggtggcttgccaccggcgatggcgaccggcgcacgggtgagtaacgcgtatccaacctgcccgcaaccgcggaatagcccgccgaaaggcggattaatgccgcatgagctcgcgcgagggcatctgatcgcgagcaaaggttgattccggttgc

SEQ ID NO: 1379 - DNA, 225 bp, Unknown
  Encodes 16S rRNA from Coprococcus
agagtttgatcatggctcaggatgaacgctggcggcgtgcctaacacatgcaagtcgaacgaagcacttctcccgtcaaaggtgattagcttgctatgaagcggagacatttgaagtgacttagtggcggacgggtgagtaacgcgtgggtaacctgccccataccgggggacaacagttggaaacggctgctaataccgcataagcgcacgatgtcgcatggca

SEQ ID NO: 1380 - DNA, 225 bp, Unknown
  Encodes 16S rRNA from Lentisphaera
agagtttgatcatggctcagaatgaacgctggcggcatggattaggcatgcaagtcgaacgagaaagcggcctcggccgcgagtaaagtggcgaaagggtgagtagcacgtggggaacctgccccggggaccggaacaagcccgtgaaaacgggtctgaaaccggatgtcgccccggcccgcatgggccggaggcgaaaaattcattgccccgggatggccccgc

SEQ ID NO: 1381 - DNA, 225 bp, Unknown
  Encodes 16S rRNA from Clostridium XlVa
agagtttgatcctggctcaggatgaacgctggcggcgtgcttaacacatgcaagtcgaacggagatatatttatgaagttttcggatggaatatatatatcttagtggcggacgggtgagtaacgcgtaaacaatctgccttagagagggggataacagatagaaatatctgctaataccgcataagaccacgtacaggcatctagacggggtaaaaggagtaat

SEQ ID NO: 1382 - DNA, 225 bp, Unknown
  Encodes 16S rRNA from Saccharofermentans
agagtttgatcatggctcaggacgaacgctggcggcgtgcctaacacatgcaagtcgagcggactctttacaggaaagtgcttgcaccggaatgtaaagagttagcggcggacgggtgagtaacgcgtgagcaatctgtcccatacagggggataataccgcgaaagaggttctaataccgcatgagaccacagtgaggcatctcacaggggtcaaaggagcaat

SEQ ID NO: 1383 - DNA, 225 bp, Unknown
  Encodes 16S rRNA from Porphyrobacter
agagtttgatcatggctcagaacgaacgctggcggcatgcctaacacatgcaagtcgaacgagaccttcgggtctagtggcgcacgggtgcgtaacgcgtgggaacctgcccttaggttcggaataactccccgaaaggggtgctaataccggataatgtcttcggaccaaagatttatcgcctttggatgggcccgcgttggattagcttgttggtgaggtaac

SEQ ID NO: 1384 - DNA, 225 bp, Unknown
  Encodes 16S rRNA from Rhodobacter
agagtttgatcatggctcagaatgaacgctggcggcaggcctaacacatgcaagtcgaacgaagtcttcggacttagtggcggacgggtgagtaacacgtgggaacgtaccctttgctacggaatagcctcgggaaactgggagtaataccgtatgtgcccttcgggggaaagatttatcggcaaaggatcggcccgcgttggattagctagttggtggggtaat

SEQ ID NO: 1385 - DNA, 225 bp, Unknown
  Encodes 16S rRNA from Oscillibacter
agagtttgatcctggctcaggacgaacgctggcggcgtgcctaacacatgcaagtcgaacgagaatctaatgacggagttttcggacaactgagttagaggaaagtggcggactggtgagtaacgcgtgagcaacctgcctttcagagggggacaacagttggaaacgactgctaataccgcataacatacacatgaggcatctcgagtgtatcaaaggagcaat

SEQ ID NO: 1386 - DNA, 225 bp, Unknown
  Encodes 16S rRNA from Roseburia
agagtttgatcatggctcaggatgaacgctggcggcgtgcttaacacatgcaagtcgaacggggtattaacgctgaacgagcgaatagcttgctaggaacgagttcttgttaagacctagtggcggacgggtgagtaacgcgtgggtaacctgcccattaccgggggacaacagttggaaacgactgctaataccgcataagcgcacggggacgcatgtttctgt

SEQ ID NO: 1387 - DNA, 225 bp, Unknown
  Encodes 16S rRNA from Prevotella
agagtttgatcctggctcaggatgaacgctagctacaggcttaacacatgcaagtcgaggggcatcaggaggtcagcttgctgaccttgctggcgaccggcgcacgggtgagtaacacgtatccaacctgccctgtacacggggatagccctctgaaaggaggattaatacccgatgttgtcgcggagggacatccctctgcgaccaaagtctcaacggtacggg

SEQ ID NO: 1388 - DNA, 225 bp, Unknown
  Encodes 16S rRNA from Aquiflexum
agagtttgatcatggctcaggatgaacgctggcggcaggcttaatacatgcaagtcgaacggtaaggccgagcgtagcaatacgcgaggtacacgagtggcgcacgggtgcgtaacgcgtatgcaacctgcccccttccgggacaaaacgtcgagaaattggcgctaatatcccatggcgaccttatgaggcatctcgtttggtccaaagattcattggaagggg

SEQ ID NO: 1389 - DNA, 225 bp, Unknown
  Encodes 16S rRNA from Rhodopirellula
agagtttgatcatggctcagaatgaacgttggcggcgtggattaggcatgcaagtcgtacggtaagccccatagcttgctacggggcctagagtggcgaaagggataggataatgtagatgacataccctcgggaccgggatagcgtttggaaacgaacggtaataccggataacatctccggatcaaaggtgagattccgcctgaggattggtttacacactat

SEQ ID NO: 1390 - DNA, 225 bp, Unknown
  Encodes 16S rRNA from Bacteroides
agagtttgatcctggctcaggatgaacgctagctacaggcttaacacatgcaagtcgaggggcagcattaagtcagcttgctgatttagatggcgaccggcgcacgggtgagtaacgcgtatccaacctgccccctacccggggatagccttgcgaaagtaagattaatacccggtgctgttatgatcccgcatggggatataacgaaagattcatcggtagggg

SEQ ID NO: 1391 - DNA, 225 bp, Unknown
  Encodes 16S rRNA from Bacteroides
agagtttgatcctggctcaggatgaacgctagctacaggcttaacacatgcaagtcgaggggcagcatggccgaagcttgcttcggccgatggcgaccggcgcacgggtgcgtaacacgtatccaatctacccgtcacttggggataggctttcgaaagaaagattaatacccgatggtatgtccatgccgcatgacgtggacattaaagatttatcggtgtcgg

SEQ ID NO: 1392 - DNA, 225 bp, Unknown
  Encodes 16S rRNA from Clostridium XlVa
agagtttgatcatggctcaggatgaacgctggcggcgtgcctaacacatgcaagtcgaacggagatgtgcaccgaatgaggattcgtctgatttcaccgcgcatctgagtggcggatgggtgagtaacgcgtggataacctgcccttcactgggggataacaaccggaaacgggtgctaataccgcataggcgcacgaagtcgcatgactttgagcgtaaagatt

SEQ ID NO: 1393 - DNA, 225 bp, Unknown
  Encodes 16S rRNA from Clostridium IV
agagtttgatcctggctcaggatgaacgctggcggcgtgcctaatacatgcaagtcgaacggagcaccttggtgctcagtggcgaacgggtgaggagaacataggtaacctgcccctccgagggggacaacagctggaaacggctgctaagaccgcatagacgcattcagggcatcctggatgcgctaaatgaccggatggtcagcggggggatggacctatgca

SEQ ID NO: 1394 - DNA, 225 bp, Unknown
  Encodes 16S rRNA from Prevotella
agagtttgatcctggctcaggatgaacgctagcggcaggcctaacacatgcaagtcgaggggcagcgcgggatagcaatatcctggcggcgaccggcagaagggtgcgtaacgcgtgagcgacatgcccgtcaccgggggacaagcgctggaaacggcgtctaataccccatatgcctggggagtgcatgcttccttggtgaaagtttcgacggtgacggattgg

SEQ ID NO: 1395 - DNA, 225 bp, Unknown
  Encodes 16S rRNA from Mogibacterium
agagtttgatcatggctcaggatgaacgctggcggcgtgcctaatacatgcaagtcgagcgagaaattactttgacgcgttttcggacaagtctgtgtaatggaaagcggcggacgggtgagtaacgcgtaggcaacctgcccttagcagagggatagccattggaaacgatgattaaaacctcataatgctgcactaacacatgttagagcagccaaagattta

SEQ ID NO: 1396 - DNA, 225 bp, Unknown
  Encodes 16S rRNA from Prevotella
agagtttgatcatggctcaggatgaacgctagctacaggcttaacacatgcaagtcgaggggaaacgatatcgaaagcttgctttcgataggcgtcgaccggcgcacgggtgagtaacgcgtatccaacctgcctggaaatagggaataatccgtggaaacgcggcctaatgtcctatgtgctccgaagaggacatctgatttggagtaaagatttatcgtttcc

SEQ ID NO: 1397 - DNA, 225 bp, Unknown
  Encodes 16S rRNA from Clostridium XlVa
agagtttgatcatggctcaggatgaacgctggcggcgtgcttaatacatgcaagtcgaacggagatattccaccgagagaagctgagtgcttgcacaaggccaatctcaccggattatcttagtggcggacgggtgagtaacgcgtgggtaacctgccttatacaggggaataacagccagaaatgactgctaataccgcataagcgcacgagaccgcatggtca

SEQ ID NO: 1398 - DNA, 225 bp, Unknown
  Encodes 16S rRNA from Prevotella
agagtttgatcctggctcaggatgaacgctagctacaggcttaacacatgcaagtcgaggggaaacggtagtgggtggcttgccacccgctggacgtcgaccggcggatgggtgcgtaacgcgtatccaacctgccgcagtcccggggatagcccgtggaaacgcggattaacacccgatggtgcatacgttccgcatggcgcgtatgccaaatgcgaaggactg

SEQ ID NO: 1399 - DNA, 225 bp, Unknown
  Encodes 16S rRNA from Capnocytophaga
agagtttgatcctggctcaggatgaacgctagcggcaggcctaacacatgcaagtcgaggggcagcgcggtgcagcaatgcactggcggcgaccggcgcacgggtgcgtaacgcgtatgcaacccacccgcaacaggggtataacggagggaaacttccactaatcccccatattgccgtcatcccgcatggggaggcggcgaaagcttcggcggttgcggacgg

SEQ ID NO: 1400 - DNA, 225 bp, Unknown
  Encodes 16S rRNA from Acholeplasma
agagtttgatcatggctcaggatgaacgctggcggcgtgcctaatacatgcaagtcgaacgggagtgcttgcactccagtggcgaacgggtgagtaacacgtaggtaatctagcattaagacgaggatagcttctagaaatgggagataatactggataggaaattttcctgcatggggaaatttttaaagatttatcgcttaatggggagcctgcggtgcatta

SEQ ID NO: 1401 - DNA, 225 bp, Unknown
  Encodes 16S rRNA from Clostridium IV
agagtttgatcctggctcaggacgaacgctggcggcgtgcctaacacatgcaagtcgaacggagttattagagtgaagttttcggatggagcgataataacttagtggcggacgggtgagtaacgcgtgagtaacctgcccatcagagggggataacgttctgaaaagaacgctaataccgcataacatatttggttcgcatggactgaatatcaaaggagcaat

SEQ ID NO: 1402 - DNA, 225 bp, Unknown
  Encodes 16S rRNA from Succinivibrio
agagtttgatcatggctcagattgaacgctggcggcaggcctaatacatgcaagtcgaacggtaacatggaagtagcaatacttttgatgacgagtggcggacgggtgagtaatacgtagataatctgccttctagagggaaataacagagagaaatttctgctaatgtcccataagaccacactatggcatcttagagtgatcaaaggagtaatccgctagaag

SEQ ID NO: 1403 - DNA, 225 bp, Unknown
  Encodes 16S rRNA from Pseudonocardia
agagtttgatcctggctcaggacgaacgctggcggcgtgcttaatacatgcaagtcgagcgagctacttcggtagcgagcggcgcacgggtgagtaacgcgtagatgatctaccctcgagactgagatacctctgggaaactggagttaataccagataacgcacattggttggttctgatgtgttaaagcggtgcaagtcgcacttgaggatgagtctgcggcc

SEQ ID NO: 1404 - DNA, 225 bp, Unknown
  Encodes 16S rRNA from Clostridium XlVa
agagtttgatcctggctcaggatgaacgctggcggcgtgcttaacacatgcaagtcgaacggacatggcaccggagcagaagagttcgcttggacgctccaccgtcatgttagtggcggacgggtgagtaacgcgtgagcaaccaaccctatgcagggggataacagttagaaatgactgctaataccgcataagcccacagcatcgcatggtgcagggggaaaa

SEQ ID NO: 1405 - DNA, 225 bp, Unknown
  Encodes 16S rRNA from Butyricimonas
agagtttgatcctggctcaggatgaacgctagcgacaggcttaacacatgcaagtcgaggggcagcatggcggtagcaatactgctgatggcgaccggcgcactggtgagtaacacgtatgcaacctgccccgcgcagggggataatccggagaaatctggtctaataccccgtacgccgcgcttccgcatggtagtgcggtgaaaggagcgatccggcacggga

SEQ ID NO: 1406 - DNA, 225 bp, Unknown
  Encodes 16S rRNA from Anaerovorax
agagtttgatcctggctcaggatgaacgctggcggcgtgcctaacacatgcaagtcgagcgggaaatacagaacagaaggttcgctggaagttttgtatggagagcggcggacgggtgagtaacgcgtaggcaacctgccctttgcagagggatagccactggaaacggtgattaaaacctcataatgccattgattcacatgtttcgatggccaaagatttatc

SEQ ID NO: 1407 - DNA, 225 bp, Unknown
  Encodes 16S rRNA from Prevotella
agagtttgatcctggctcaggatgaacgctagctacaggcttaacacatgcaagtcgaggggtaacgtgagggaagcttgcttcccttgacgacgaccggcgaatgggtgagtaacgcgtatccaacctgccgcacgcccgggaacagcccttggaaacgaggattaaatcccgataccttatgctgctgcatggtggtataagaaaacaggcatgcgatgggga

SEQ ID NO: 1408 - DNA, 225 bp, Unknown
  Encodes 16S rRNA from Butyricimonas
agagtttgatcctggctcaggatgaacgctagcgacaggcttaacacatgcaagtcgaggggcagcatgagggtagcaataccttcgatggcgaccggcgcactggtgagtaacacgtatgcaacctgcccttgtcagggggataatccggggaaacccggtctaataccgcataacaccttggggggcctccccttaggttgaaagatacgtcggacagggatg

SEQ ID NO: 1409 - DNA, 225 bp, Unknown
  Encodes 16S rRNA from Parabacteroides
agagtttgatcatggctcaggatgaacgctagcgacaggcttaacacatgcaagtcgaggggcagcggggcgtggcaacacgccgccggcgaccggcgcactggtgagtaacacgtatgcaacctgcccatgagagggggataacccgtggaaacgcggactaataccccgtaagccggcgtgccgcatggcatgttggtgaaaggagcgatccgttcatggatg

SEQ ID NO: 1410 - DNA, 225 bp, Unknown
  Encodes 16S rRNA from Clostridium XlVa
agagtttgatcatggctcaggatgaacgctggcggcgtgcctaacacatgcaagtcgaacggagtaccaccggactgagattcgtcgaaggaaggtgactacttagtggcggacgggtgagtaacgcgtgggtaacctgcctcatagagggggacaacagttggaaacgattgctaataccgcataagcccgcagtaccgcatggtacagagggaaaagattcat

SEQ ID NO: 1411 - DNA, 225 bp, Unknown
  Encodes 16S rRNA from Clostridium XlVb
agagtttgatcatggctcaggatgaacgctggcggcgtgcttaacacatgcaagtcgaacgaagaggtgctgagggataggcttcggctttgaacacggcgcatatcttagtggcggacgggtgagtaacgcgtgggcaacctgccctttacaggggaataatcattggaaacgatgactaataccgcatgtcaccgtgagatggcatcattttacgggaaaagg

SEQ ID NO: 1412 - DNA, 225 bp, Unknown; identical to SEQ ID NO: 100
  Encodes 16S rRNA from Bacteroides

SEQ ID NO: 1413 - DNA, 225 bp, Unknown
  Encodes 16S rRNA from unknown taxa
agagtttgatcctggctcaggacgaacgctggcggcgtgcttcatacatgcaagtcgaacgagaagtcaccttcgggtgatggatagtggcggacgggtgagtaatgtgtagagaatctgccctagagagggggatagcagttggaaacgactattaataccccatatgcgcgtagttgcgatactattcgtgaaagattaatcgctctaggatgagtctgcatc

SEQ ID NO: 1414 - DNA, 225 bp, Unknown
  Encodes 16S rRNA from Riemerella
agagtttgatcatggctcaggatgaacgctagcgggaggcctaacacatgcaagccgagcggtagaaagtagcttgctacttttgagagcggcgtacgggtgcgtaacacgtgtgcaacctgcctttatctggagaatagcctttcgaaaggaagattaatgctccataacatattgaatggcatcatttaatattgaaagctgcggcggatagagatgggcacg

SEQ ID NO: 1415 - DNA, 225 bp, Unknown
  Encodes 16S rRNA from Anaeroplasma
agagtttgatcatggctcaggattaacgctggcggcgtgcctaatacatgcaagtcggatggttagcttgctaaccatggcgaacgggtgagtaacacgtaggtaacctgtcttttagccgaggataaccattggaaacgatggataatactggataggacatttgaaggcatctttagatgtttaaagatttatcactagaagaggggcctgcggcgcattagc

SEQ ID NO: 1416 - DNA, 225 bp, Unknown
  Encodes 16S rRNA from Ruminococcus
agagtttgatcctggctcaggacgaacgctggcggcgtgcctaacacatgcaagtcgaacggagctgaagagcttgcttttcagcttagtggcggacgggtgagtaacgcgtgagtaacctgcctccgagagtggaataacgttttgaaaagaacgctaataccgcataacgcacaagagtcgcatggctaaagtgccaaagatttcatcgctcggagatggact

SEQ ID NO: 1417 - DNA, 225 bp, Unknown
  Encodes 16S rRNA from unknown taxa
agagtttgatcctggctcagaacgaacgctggtagcgtggattaggcatgcaagtcgaacgggatcgcccgattagcaataaccgggcgtgagagtggcggattggggaggaacacgtgagcaacctgcccttgagttggggaaaaccgttggaaacgacggctaataccggatgtggcgcccgacgacatcgtcggagcgctaaagggggccgcaaggctcccg

SEQ ID NO: 1418 - DNA, 225 bp, Unknown
  Encodes 16S rRNA from Lachnospiracea incertae sedis
agagtttgatcctggctcaggatgaacgctggcggcgtgcttaatacatgcaagtcgaacgaagcacccctcccgatgatatgacgagcttgctctgaattgaatcacctggggtgactgagtggcggacgggtgagtaacgcgtgggtaacctacctatgacagggggatagcagttggaaacgactgataataccgcataagtgcacagtatcgcatgataca

SEQ ID NO: 1419 - DNA, 225 bp, Unknown
  Encodes 16S rRNA from Syntrophococcus
agagtttgatcctggctcaggatgaacgctggcggcgtgcctaacacatgcaagtcgaacgaggctcttttctttgaagtttcgaccgaaaagagaagatcaccgagtggcggatgggtgagtaacgcgtggagaacctacccttatcagggggataacaactggaaacggttgacaataccgcatatatgagcagaccgcatgatcagctcaggaaagatttat

SEQ ID NO: 1420 - DNA, 225 bp, Unknown
  Encodes 16S rRNA from Clostridium IV
agagtttgatcatggctcaggatgaacgctggcggcgtgcataacacattcaagtcgaacgaagcactttggacggaacccttcggggggaagactgatttgactgagtggcggacgggtgagtaacgcgtgagcaacctgccttgaagagggggataacacagggaaacttgtgctaataccgcataacatatcgtgatcgcatggtcgtggtatcaaagctcc

SEQ ID NO: 1421 - DNA, 225 bp, Unknown
  Encodes 16S rRNA from Barnesiella
agagtttgatcatggctcaggatgaacgctagcgacaggcctaacacatgcaagtcgaggggcagcgcgttggtagcaataccgatggcggcgaccggcgcacgggtgcgtaacaggtgtgcaatctgtccatagtcggaggatagcccgctgaaaggcggattaatactccatgtgagttgaagccgcatggttttaatttgaaacgcgaggactatggttgag

SEQ ID NO: 1422 - DNA, 225 bp, Unknown
  Encodes 16S rRNA from Olivibacter
agagtttgatcctggctcaggatgaacgctagcggcaggcttaacacatgcaagtcgaggggcagcgcgttgtagcaatacaatggcggcgaccggcggaagggtgcgtaacgcgtgagcaacctgcccctgtcagggggatagtcgatggaaacgtcgcgtaataccccgtacgatgcgtgaccgcatggtcgtgcattgaaagatttatcggacagggatggg

SEQ ID NO: 1423 - DNA, 225 bp, Unknown
  Encodes 16S rRNA from Clostridium XlVa
agagtttgatcatggctcaggatgaacgctggcggcgtgcttaatacatgcaagtcgaacgaagcactttttccggaagccctcgggccgaaggaagctgtgacttagtggcggacgggtgagtaacgcgtgggtaacctgcctcatacagggggacaacagttggaaacggctgctaataccccataagcgcacaacatcgcatggtgatgtgtgaaaagattt

SEQ ID NO: 1424 - DNA, 225 bp, Unknown
  Encodes 16S rRNA from Cryptanaerobacter
agagtttgatcatggctcaggacgaacgctggcggcgtgcttaacacatgcaagtcgaacggacgaatgtttttgcactcagtatgttgtaaaatatattgagtgcagaaatatgagttagtggcggactggtgagtaacgcgtgagcaacctgcctttaactggggaataccacttagaaataggtgctaataccgcataacattgcactgtggcatcacagag

SEQ ID NO: 1425 - DNA, 225 bp, Unknown
  Encodes 16S rRNA from Saccharofermentans
agagtttgatcatggctcaggacgaacgctggcggcgtgcctaacacatgcaagtcgagcggactttcatcaggaaggtgcttgcactggaaagatgagagttagcggcggacgggtgagtaacgcgtgagcaatctgtcccatacagggggataataccgcgaaagaggttctaataccgcatgagaccacggtgaggcatctcacaggggtcaaaggagcaat

SEQ ID NO: 1426 - DNA, 225 bp, Unknown
  Encodes 16S rRNA from Clostridium IV
agagtttgatcatggctcaggatgaacgctggcggcgtgcataacacattcaagtcgaacgaagcactgtcgaggaagtcttcggatggaattgactttgacttagtggcggacgggtgagtaacgcgtgagcaaccttcctggtagtgagggataacacagggaaacttgtgctaataccgcatgacgcatgattgtcgcatggcagacatgccaaagacatgt

SEQ ID NO: 1427 - DNA, 225 bp, Unknown
  Encodes 16S rRNA from Coprococcus
agagtttgatcatggctcaggatgaacgctggcggcgtgcttaacacatgcaagtcgaacggagtttagcgcttccgaagcttcggcagaggattgttaaacttagtggcggacgggtgagtaacgcgtgggtaacctgccatgtacagggggataacacttagaaataggtgctaataccgcataagcgcacatgatcgcatgatcaggtgtgaaaaactgagg

SEQ ID NO: 1428 - DNA, 225 bp, Unknown
  Encodes 16S rRNA from Barnesiella
agagtttgatcctggctcaggatgaacgctagcgacaggcctaacacatgcaagtcgaggggcagcgggagtgaagcttgcttcacttgccggcgaccggcgcacgggtgagtaacgcgtatgcaacctgcctgtaacagggggataacccggagaaatccggactaagaccgcataacgctgagaagccgcatgacttttcagccaaatattcataggttacag

SEQ ID NO: 1429 - DNA, 225 bp, Unknown
  Encodes 16S rRNA from Clostridium sensu stricto
agagtttgatcatggctcaggacgaacgctggcggcgtgcctaacacatgcaagtcgagcggagacatatcacggaaggattcgtccggaaggggtatgtttgagcggcggacgggtgagtaacgcgtgatgaacctgtccttcacagggggataagacatcgaaaggtgttctaataccgcataggaccacggtaccgcatggtacaggggtgaaaggagcgat

SEQ ID NO: 1430 - DNA, 225 bp, Unknown
  Encodes 16S rRNA from Hydrogenoanaerobacterium
agagtttgatcatggctcaggagaaacgctggcggcgcacataagacatgcaagtcgaacggaatttagccaaatgtttacatgaggcgaagatttagtggcggacgggtgagtaacacgtgagcaacctaccttgaagagggggataacattgagaaatcagtgctaataccgcataacacttcatattcacatgaataagaagtcaaaggagaaatccgcttt

SEQ ID NO: 1431 - DNA, 225 bp, Unknown
  Encodes 16S rRNA from Clostridium XlVb
agagtttgatcatggctcaggatgaacgctggcggcgtgcttaacacatgcaagtcgagcgaagttattagagcttgctttgataacttagcggcggacgggtgagtaacgcgtgggtaacctgccctgtacagaggaataacagttagaaatgactgctaatacctcataagccgacggaatggcatcattttgtcggaaaagatttatcggtacaggagggac

SEQ ID NO: 1432 - DNA, 225 bp, Unknown
  Encodes 16S rRNA from Selenomonas
agagtttgatcctggctcaggacgaacgctggcggcgtgcttaacacatgcaagtcgaacggagctgaatagcttgctatgaaagcttagtggcaaacgggtgagtaacgcgtgggcaacctgccggaaagatggggacaacatcccgaaaggggtgctaataccgaatgttgtatatagagcgcatgctctgtatattaaaggatactatccgctttccgatgg

SEQ ID NO: 1433 - DNA, 225 bp, Unknown
  Encodes 16S rRNA from Prevotella
agagtttgatcctggctcaggatgaacgctggcggcgtgcctaacacatgcaagtcgaggggcatcaggacggtagcttgctatcgttgctggcgaccggcgcacgggtgagtaacgcgtatccaaccttcccatgactccggttcagcccgccgaaaggcggattactcccggatggtttccgaagagggcatctgatttggaataaagattgatcggtcatgg

SEQ ID NO: 1434 - DNA, 225 bp, Unknown
  Encodes 16S rRNA from Hydrogenoanaerobacterium
agagtttgatcatggctcaggacgaacgctggcggcgcgcctaacacatgcaagtcgaacgggactagtgaccggaggatagatgaagtttatcttgcgatcactagttcagtggcggacgggtgagtaaagcatgagcaacttgcctgatagagggggatagcttttggaaacagaagataataccgcatacttcaaaagtttcgcatggagtttttggaaaag

SEQ ID NO: 1435 - DNA, 225 bp, Unknown
  Encodes 16S rRNA from Spirochaeta
agagtttgatcctggctcagaacgaacgctggcggcgcgtcttaagcatgcaagtcgagcggtaacttaccttcgggtaagctagagcggcggactggtgagtaacacgtgggtgacataccctccggatcgggatagctcctagaaataggagataataccgggtacgaccactacggtcagagcgtagtgaggaaaggtgcattagcaccgccggaggagtgg

SEQ ID NO: 1436 - DNA, 225 bp, Unknown
  Encodes 16S rRNA from Enterorhabdus
agagtttgatcatggctcaggatgaacgctggcggcgtgcttaacacatgcaagtcgaacgattaacccgccttcgggcggtcatagagtggcgaacgggtgagtaacacgtgaccaacctgccccgcgcaccgggacagcctcgcgaaagcgggattaataccggatactccgcaccccccgcatggggggtgcgggaaagctccggcggcgcgggatggggtc

SEQ ID NO: 1437 - DNA, 225 bp, Unknown
  Encodes 16S rRNA from Thermoanaerobacter
agagtttgatcctggctcaggatgaacgctggcggcgcgcctaacacatgcaagtcgagcggcgaaggggattcgtccccggaccagcggcgaacgggtgagtaacgcgtgggcaacctgccccgggcccggggatagcggggggaaacccccggtaagacccgacgcgcccggaggggggcatccccctccgggcgaaggagacggcccgggatgggcccgcgt

SEQ ID NO: 1438 - DNA, 225 bp, Unknown
  Encodes 16S rRNA from unknown taxa
agagtttgatcatggctcaggacgaacgctagcgacgtgtctaagaaatgcaagtcgggcgatgacggaggcttcggcctcccgattagcggcgaacggtcgcgtaacacgtaagcaatctgccccaaagttcgggatagcccggcgaaagtcggattaataccggatgtggatgtttttgcgcatgcatttgcatctaaagcagcgatgcgctttgggatgagc

SEQ ID NO: 1439 - DNA, 225 bp, Unknown
  Encodes 16S rRNA from Syntrophococcus
agagtttgatcatggctcaggatgaacgctggcggcgtgcttaacacatgcaagtcgaacgggaactctgaactgaaggttcgctggatgtttagaaattctagtggcggacgggtgagtaacgcgtgggtaacctgcctataagacgtgaacaacagttagaaatgactgctaatacacgataagcacacagtattgcatgatacagtgtgaaaagaatttcgc

SEQ ID NO: 1440 - DNA, 225 bp, Unknown
  Encodes 16S rRNA from Sphingobium
agagtttgatcatggctcagagtgaacgctagcggaatgctttatacatgcaagtcgaacggagttttattgtgaagtagcaatatggaatagtaaaacttagtggcgaactggcgagtaatagttaggaacttaccgagtagtgggggacaacagttagaaatgactgctaataccgcatacgcccgagaggggaaagatttatcgctatttgagaggcctaac

SEQ ID NO: 1441 - DNA, 225 bp, Unknown
  Encodes 16S rRNA from Clostridium XlVa
agagtttgatcatggctcaggatgaacgctggcggcgtgcctaacacatgcaagtcgaacgaagctcactttttgaattcttcggaaggaaaaaagagaagacttagtggcggacgggtgagtaacgcgtgggtaatctgccctgtacagggggacaacagttagaaatgactgctaataccgcataagcgtacggtaccgcatggtacagtacgaaaaactgag

SEQ ID NO: 1442 - DNA, 225 bp, Unknown
  Encodes 16S rRNA from Geosporobacter
agagtttgatcctggctcaggatgaacgctggcggcgtgcctaacacatgcaagtcgagcgggaatctcctgattgaaacttcggtagatagacggagaggatagcggcggacgggtgagtaacgcgtaggtaagctgccctatgcacagggatagcctagggaaacctggattaatacctgatgacgctgcgaggtcacatggccatgcagccaaagtttttcg

SEQ ID NO: 1443 - DNA, 225 bp, Unknown
  Encodes 16S rRNA from Enterorhabdus
agagtttgatcatggctcaggatgaacgctggcggcgtgcctaacacatgcaagtcgaacggttaagccggcttcggccgggcatacagtggcgaacgggtgagtaacacgtgaccaacctgccccgcgcaccgggacagccccccgaaagggggattaataccggatactccgcctcccccgcatgaggggggcgggaaagctccggcggcgcgggatggggtc

SEQ ID NO: 1444 - DNA, 225 bp, Unknown
  Encodes 16S rRNA from unknown taxa
agagtttgatcctggctcagaacgaacgctggtagcgtggattaggcatgcaagtcgaacgggatccgggaggtagcaatacttcctggtgagagtggcggattggggaggaacacgtgagcaacctgcctttgagtcggggaaaaccgttggaaacgacggctaataccggatgtggcgcccggtgacatcactggagcgctaaagggggccgcaaggctctcg

SEQ ID NO: 1445 - DNA, 225 bp, Unknown
  Encodes 16S rRNA from Clostridium XlVa
agagtttgatcctggctcaggatgaacgctggcggcgtgcctaacacatgcaagtcgaacggagtacagacgctgtgagaggaagtgcttgcacagacttgaacttgtttgtacttagtggcggacgggtgagtaacgcgtggaaaacctgcctcatacagggggataacagggagaaattcctgctaataccgcataagcgcacggaaccgcatggttcagtgt

SEQ ID NO: 1446 - DNA, 225 bp, Unknown
  Encodes 16S rRNA from Parabacteroides
agagtttgatcctggctcaggatgaacgctagcgacaggcttaacacatgcaagtcgaggggcagcgcggcgtgagcaatcatgctggcggcgaccggcgcactggtgagtaacacgtatgcaacctgccccctgccggggaataaaccagggaaacttggcctaatgccgcataacacgccttccggcatcggtaggcgttgaaagctccggcggcaggggatg

SEQ ID NO: 1447 - DNA, 225 bp, Unknown
  Encodes 16S rRNA from Cryptanaerobacter
agagtttgatcatggctcaggacgaacgctggcggcgtgcttaatacatgcaagtcgaacggatatgtagcaatacatattagtggcggacgggtgagtaacgcgtaatcaacctgccttttacaggggaataacacttggaaacaggtgctaataccgcatatgaccacaacacggcatcgtgaaggggtaaaagttttatcggtaaaagagggggttgcgtat

SEQ ID NO: 1448 - DNA, 225 bp, Unknown
  Encodes 16S rRNA from Anaeroplasma
agagtttgatcctggctcaggattaacgctggcggcgtgcctaatacatgcaagtcgaatggttagcttgctaaccatggcgaacgggtgagtaacacgtaggcaacctgactataagacgaggataaccattggaaacgatggataatactggataggatatagatgggcatccatttatatttaaagatttatcacttaatgaggggcctgcggcgcattagc

SEQ ID NO: 1449 - DNA, 225 bp, Unknown
  Encodes 16S rRNA from Spirochaeta
agagtttgatcatggctcagaacgaacgctggcggcgcgtcttaagcatgcaagtcgggcggcaagctgccttcgggcagcctagagcggcggactggtgagtaacgcgtgggtgacgcacccccttgacggggacagcccgcagaaatgcggggtaataccggataaggtccccggggttggagcccggggaggaaaggagctattgctccgcgaggggagcgg

SEQ ID NO: 1450 - DNA, 225 bp, Unknown
  Encodes 16S rRNA from Prevotella
agagtttgatcatggctcaggatgaacgctagctacaggcttaacacatgcaagtcgaggggcagcgggagagtagcttgctactcttgccggcgaccggcgaatgggtgagtaacgcgtatccaacctgccacatgcccgggaatagcccttggaaatgaggattaagtcccgatatgcttatttgtcgcatgacatgtaagtgaaacaggcatgtgatgggga

SEQ ID NO: 1451 - DNA, 225 bp, Unknown
  Encodes 16S rRNA from Roseburia
agagtttgatcatggctcaggatgaacgctggcggcgtgcttaacacatgcaagtcgaacggactctaagtagaaagcggagcttgctccaatggaaatttagagttagtggcggacgggtgagtaacgcgtgggtaacctgccttgcacagggggacaacagttggaaacgactgctaataccgcataagccggtagtgccgcatggcacattcggaaaagatt

SEQ ID NO: 1452 - DNA, 225 bp, Unknown
  Encodes 16S rRNA from Pedobacter
agagtttgatcctggctcaggatgaacgctagcggcaggcctaatacatgcaagtcgaacggtaagcggtccttcgggactgtgagagtggcggacgggtgcgtaacgcgtatgcaaccaacccccgacgggcggatagccggtggaaacgccggataagccgccatgcggccgaggaggggcatccctctttggtcaaagcggagacgcggtgggggacgggca

SEQ ID NO: 1453 - DNA, 225 bp, Unknown
  Encodes 16S rRNA from Pedobacter
agagtttgatcatggctcaggatgaacgctagcggcaggcctaacacatgcaagtcgaggggcagcgcggtgcagcaatgcactggcggcgaccggcgcacgggtgcgtaacgcgtatgcaacccacccgcaacaggggtataacggagggaaacttccactaatcccccatattgccgtctttccgcatgggggggcggcgaaagcttcggcggttgcggacgg

SEQ ID NO: 1454 - DNA, 225 bp, Unknown
  Encodes 16S rRNA from Eggerthella
agagtttgatcctggctcaggatgaacgctggcggcgtgcttaacacatgcaagtcgaacgagaacgcaccttcgggtgctagtagagtggcgaacgggtgagtaacacgtgagcaacctgccttccacttcgggataacccagggaaacctgtgctaataccgaatactccgggacctccgcatgggggacccgggaaagcgcatacggtggaagatgggctcg

SEQ ID NO: 1455 - DNA, 225 bp, Unknown
  Encodes 16S rRNA from Prevotella
agagtttgatcctggctcaggatgaacgctagctacaggcttaacacatgcaagtcgaggggcagcatgaagtttgcttgcaaactttgatggcgaccggcgcacgggtgagtaacgcgtatccaacctgcccattacccggggatagcccgccgaaaggcgaattaatacccgatgtggtcccatgacggcatcagagtgggaccaaagtcttgtcggtaacgg

SEQ ID NO: 1456 - DNA, 225 bp, Unknown
  Encodes 16S rRNA from Rikenella
agagtttgatcctggctcaggatgaacgctagcggcaggcttaacacatgcaagtcgaggggcagcgcggagtagcaatactctggcggcgaccggcgcacgggtgcgtaacgcgtatgcaacctgcctgcgacagggggataacctggagaaattcggactaataccccataccacgcctggcggcatcgccgggcgttgaaaggagcgatccggtcgcagatg

SEQ ID NO: 1457 - DNA, 225 bp, Unknown
  Encodes 16S rRNA from Anaerophaga
agagtttgatcctggctcaggatgaacgctagcgacaggcttaacacatgcaagtcgaggggcagcgagtggcgttgttcgcaacgccatgtcggcgaccggcgcactggtgagtaacacgtatgcaacctgcccttcaccggggcataacccttggaaacgaggcctaattccccatatacagcattcgggcatccgtgagctgtgaaaggtttattccggtga

SEQ ID NO: 1458 - DNA, 225 bp, Unknown
  Encodes 16S rRNA from Spirochaeta
agagtttgatcctggctcagaacgaacgctggcggcgcgtcttaagcatgcaagtcgggcggcaagctgccttcgggcagcctagagcggcggactggtgagtaacgcgtgggtgacgcacccccttgacggggacagcccgcagaaatgcggggtaataccggataaggtccccggggccggagcccggggaggaaaggagctattgctccgcgaggggagcgg

SEQ ID NO: 1459 - DNA, 225 bp, Unknown
  Encodes 16S rRNA from Clostridium IV
agagtttgatcctggctcaggagaaacgctggcggcgcacataagacatgcaagtcgaacggaatttagccgaatgtttacatgaggcgaagatttagtggcggacgggtgagtaacacgtgagcaacctaccttagagagggggataacattgagaaatcagtgctaataccgcataacactatagtaccacatggtacattagtcaaaggagaaatccacttt

SEQ ID NO: 1460 - DNA, 225 bp, Unknown
  Encodes 16S rRNA from Weissella
agagtttgatcatggctcaggatgaacgctggcggcgtgcctaatacatgcaagtcgaacgctttgtgcttaattgatatgatgagcttgctctgatttgattttttgatttcaaagagtggcgaacgggtgagtaacacgtgggtaacctacctcttagcaggggataacatttggaaacaagtgctaataccgtataatatcaacaaccgcatggttgttgat

SEQ ID NO: 1461 - DNA, 225 bp, Unknown
  Encodes 16S rRNA from Butyricicoccus
agagtttgatcctggctcaggataaacgctggcggcgcacataagacatgcaagtcgaacgggaactttgttgaagttatctgatataaagttctagtggcggactggtgagtaatgtataagcaacctgcctacaagaggggaataacagtgagaaatcattgctaataccgcataagctgtgagaatggcatcattcaaacagaaaaggaagcaattctgctt

SEQ ID NO: 1462 - DNA, 216 bp, Unknown
  Encodes 16S rRNA from Hahella
agagtttgatcatggctcaggatgaacgctagcggcaggcttaacacatgcaagtcgagcgggaactctgatgcagccatgccgcgtgtgtgaagaaggccttcgggttgtaaagcactttagttttcgagaaagggtgctgttctaatagggcagtattcagatgttagaaaaagaataagtaccggcaaactccgtgccagcagccgcggtaat

SEQ ID NO: 1463 - DNA, 225 bp, Unknown
  Encodes 16S rRNA from Acholeplasma
agagtttgatcctggctcaggatgaacgctggcggcgtgcctaatacatgcaagtcgtacgctaaacttcggtttagagtggcgaacgggtgagtaacacgtaggtaacctgcccataagacgaggataactactggaaacggtagctaatactggatagtatatagaatcgcatgattttatatttaaagatgcgtttgcatcacttatggatggacctgcggc

SEQ ID NO: 1464 - DNA, 225 bp, Unknown
  Encodes 16S rRNA from Clostridium XlVa
agagtttgatcctggctcaggatgaacgctggcggcgtgcctaacacatgcaagtcgaacgaagaccccgaggcggagatttcggtcaaagccaagggaggactgagtggcggacgggtgagtaacgcgtggataacctgccccatacagggggatagcagttggaaacgactgataataccgcataagcgcacaagggagacatcttccagtgtgaaaagattt

SEQ ID NO: 1465 - DNA, 225 bp, Unknown
  Encodes 16S rRNA from Cellulosilyticum
agagtttgatcatggctcaggacgaacgctggcggcgtgcttaacacatgcaagtcgaacggagcgtacggacggaagttttcggacggaagactgtacgcttagtggcggacgggtgagtaacgcgtgagcaatctgcccataagagggggacaacagccggaaacagctgctaataccgcatgagaccacattaccgcatggtagaggggtcaaagaaattcg

SEQ ID NO: 1466 - DNA, 225 bp, Unknown
  Encodes 16S rRNA from unknown taxa
agagtttgatcatggctcagaacgaacgctggtagcgtggattaggcatgcaagtcgaacgggatccatgaagtagcaatacggattggtgagagtggcggaagggcgaggaacacgtgagcaacctgtccttgaggtggggaaaaccgttggaaacgacggctaataccgaatgtggcgcccggagacatctccggagcgctaaagggggccgcaaggctctcc

SEQ ID NO: 1467 - DNA, 225 bp, Unknown
  Encodes 16S rRNA from Clostridium XlVa
agagtttgatcctggctcaggatgaacgctggcggcgtgcctaacacatgcaagtcgaacggtgaaacagaagcggaggttttcggactgaagcatttgtggaacagtggcggacgggtgagtaacgcgtggataacctgccccatacagggggatagcagttggaaacgactgataataccgcataagcgcacagcaccacatggtggagtgtgaaaaactatt

SEQ ID NO: 1468 - DNA, 225 bp, Unknown
  Encodes 16S rRNA from Pseudoflavonifractor
agagtttgatcatggctcaggacgaacgctggcggcgtgcttaacacatgcaagtcgaacgaggaatgttaaaaagcttgctttttaacatttcgagtggcggacgggtgagtaacgcgtgaggaacctgtcttctacagggggataacgtcccgaaagggacgctaataccgcataagaccacggtgccgcatggcacaggggtcaaaggaggaatccggtaga

SEQ ID NO: 1469 - DNA, 225 bp, Unknown
  Encodes 16S rRNA from Calditerricola
agagtttgatcatggctcagaatgaacgctggcggcatggattaggcatgcaagtcgaacgggatccctcgggatctagtggcgaaagggtgagtaacacgtgagcaacctgcccccaaggccggaataagcactggaaacggtgtctaaaaccggatgaggcctctgtccacatggacagtcagccaaatattcataccctggggatgggctcgcggcccatta

SEQ ID NO: 1470 - DNA, 225 bp, Unknown
  Encodes 16S rRNA from Clostridium IV
agagtttgatcatggctcaggacgaacgctggcggcgtgcctaacacatgcaagtcgagcggagacatacgacggagaggaagttttcggatggaatcaaagatgtatgttttagcggcggacgggtgagtaacgcgtgagcaacctgtccctcacagggggataacacaccgaaaggtgtactaataccgcatgacactgacttgagacatcttgagacagtca

SEQ ID NO: 1471 - DNA, 225 bp, Unknown
  Encodes 16S rRNA from Clostridium IV
agagtttgatcctggctcaggacgaacgctggcggcgtgcttaacacatgcaagtcgaacgagaatctgtggaaggagttttcggacaacggaaacagaggaaagtggcggacgggtgagtaacgcgtgaggaacctgccttggagagggggacaacagctggaaacggctgctaataccgcatgatgcacgatggggacatccctgacgtgccaaagatttatc

SEQ ID NO: 1472 - DNA, 225 bp, Unknown
  Encodes 16S rRNA from Adlercreutzia
agagtttgatcatggctcaggatgaacgctggcggcgtgcttaacacatgcaagtcgaacggttaaaccggcttcggccggacatagagtggcgaacgggtgagtaacacgtgaccaacctgccccgcgcaccgggacagcctcgcgaaagcgggattaataccggatactccggcggcgcgggatggggtcgcggcccatcaggtagtaggtcgggtaggggcc

SEQ ID NO: 1473 - DNA, 225 bp, Unknown
  Encodes 16S rRNA from Bulleidia
agagtttgatcatggctcaggatgaacgctggcggcgtgcctaatacatgcaagtcgaacgagagcgaccagcttgctggtcaatcgagtggcgaacgggtgagtaacacataaacaatctgccctgaagactgggataacgtagggaaacccacgctaataccggataggcagtgagggggcatcctcttactgttaaagctgggctacagcactgcaggatga

SEQ ID NO: 1474 - DNA, 225 bp, Unknown
  Encodes 16S rRNA from Lachnospiracea incertae sedis
agagtttgatcctggctcaggatgaacgctggcggcgtgcctaacacatgcaagtcgagcggagtaagacaccgaatgaggatccgtctgatttcaccgtcttacttagcggcggatgggtgagtaacgcgtggacaacctgcccttcactgggggataacaaccggaaacgggtgctaataccgcatgggcgcgaacgaccgcatgatcgatcgcgtaaagatt

SEQ ID NO: 1475 - DNA, 225 bp, Unknown
  Encodes 16S rRNA from Mucilaginibacter
agagtttgatcatggctcaggatgaacgctggcggcaggcctaatacatgcaagtcggacggcagcatgccgtagcaatacggtgatggcgagtggcgtacgggtgcgtaacacgtgtgcaacctgccccgcacagggacaaaacgccgggaaactggcgctaatatcccatgacgccgcgctggggcatccctttgcggctaaagaggcgactcggtgcgggat

SEQ ID NO: 1476 - DNA, 225 bp, Unknown
  Encodes 16S rRNA from Victivallis
agagtttgatcctggctcagaacgaacgctggcggcatggattaggcatgcaagtcgaacggaagcagcaatgcttcagtggcggaagggtgaggaacgcgtgagtaatctgccctcaagttgggaataacagttggaaacgactgctaataccgaatgtggctgtaatttcgcatgaagttatggttaaagatttattgcttgaggatgagctcgcgtcccatt

SEQ ID NO: 1477 - DNA, 225 bp, Unknown
  Encodes 16S rRNA from Anaerovorax
agagtttgatcatggctcaggatgaacgctggcggcgtgcctaacacatgcaagtcgagcgggaaatcgctgattgagatttcggttgattgaagcgatggatagcggcggacgggtgagtaacgcgtaggtaatctgccttcagcacagggatagcctagggaaacctggattaatacctgataacgcattgaagtcacatggctttgatgccaaagatttatc

SEQ ID NO: 1478 - DNA, 225 bp, Unknown
  Encodes 16S rRNA from Clostridium XlVb
agagtttgatcctggctcaggatgaacgctggcggcgtgcttaacacatgcaagtcgagcgaagtttattgagcttgcttaataaacttagcggcggacgggtgagtaacgcgtgggtaacctgccctgtacagaggaataacagttagaaatgactgctaatgcctcataagccgacggaatggcatctttcagtcggaaaagatttatcggtacaggagggac

SEQ ID NO: 1479 - DNA, 225 bp, Unknown
  Encodes 16S rRNA from Clostridium XlVa
agagtttgatcatggctcaggatgaacgctggcggcgcatttaagacatgcaagtcgaacgaaaaaatttaatctaaacggaattgaagaattatctgataagaagttttaaccgaattttttagtggcggacgggtgagtaatacatagataatctgccttttagagggaaataactactggaaacggtagataatgtcccataagaccacactaccgcatgat

SEQ ID NO: 1480 - DNA, 225 bp, Unknown
  Encodes 16S rRNA from Prevotella
agagtttgatcctggctcaggatgaacgctagcggcaggcttaacacatgcaagtcgaggggcagcgggctgtagcaatacggtgccggcgaccggcggacgggtgcgtaacgcgtatgcaacctgcccggcacaggggaatagcccggcgaaagccggagtaatgccccatggttccagcatcccgcatggggagctggataaacccgcgagggggtgccggat

SEQ ID NO: 1481 - DNA, 225 bp, Unknown
  Encodes 16S rRNA from Bacteroides
agagtttgatcatggctcaggatgaacgctagcgacaggcctaacacatgcaagtcgaggggcagcacgaaggaagcttgctttctttggtggcgaccggcgcacgggtgcgtaacgcgtatgcaacctgtccataaccgagggatagcctcccgaaagggagattaaaacttcatgtgccacatgagggcatccgagagtggtgaaacgttacgggttatggtt

SEQ ID NO: 1482 - DNA, 225 bp, Unknown
  Encodes 16S rRNA from Schwartzia
agagtttgatcctggctcaggacgaacgctggcggcgtgcttaacacatgcaagtcgaacggggcgatttgaaagcttgcttttgatgagcctagtggcaaacgggtgagtaacgcgtaggcaacctgccctcaggatggggacaacggcccgaaaggaccgctaataccgaatgacgtatctttttcgcatggaagagataccaaaggcggagcaatccgtcac

SEQ ID NO: 1483 - DNA, 225 bp, Unknown
  Encodes 16S rRNA from Pyramidobacter
agatttgatcctggctcaggatgaacgctggcggcgtgcttaacacatgcaagttgcgcggggatctgatgatgagacttcggtggatttgttagatcctagcggcggacgggtgagtaaagcacaaggacgtgtccgagcgagggggacaactgcgggaaaccgtagctaataccccgtaagccgagaggtgaaagcagcaatgcgcgagcggagcgacttgtg

SEQ ID NO: 1484 - DNA, 225 bp, Unknown
  Encodes 16S rRNA from Eubacterium
agagtttgatcctggctcaggacgaacgctggcggcgtgcctaacacatgcaagtcgaacgaagcttgatttcagatttcttcggaaagacgaatgatatgactgagtggcggacgggtgagtaacgcgtgagcaacctgccctttggatcgggatagcgtttggaaacgaacggtaataccgaataaagtatttggatggcatcatctgaataccaaagctccg

SEQ ID NO: 1485 - DNA, 225 bp, Unknown
  Encodes 16S rRNA from Lachnospiracea incertae sedis
agagtttgatcatggctcaggatgaacgctggcggcgtgcctaacacatgcaagtcgaacgaagacatgcggacggaatcctccgggaggaaggctgcatggactgagtggcggacgggtgagtaacgcgtgggtaacctgccctgtacagggggacaacagttggaaacgactgctaataccgcataagcatacaggaccgcatggtccggtatgaaaaactcc

SEQ ID NO: 1486 - DNA, 225 bp, Unknown
  Encodes 16S rRNA from Clostridium XlVa
agagtttgatcatggctcaggatgaacgctggcggcgtgcttaacacatgcaagtcgaacgaggcttaacgaatgagatcttcggatggattttgttaatccgagtggcggacgggtgagtaacgcgtgggtaacctgccttacacagggggacaacagccggaaacggctgctaataccgcataacccgctagggccgcatggcccggacggaaaagatttatc

SEQ ID NO: 1487 - DNA, 225 bp, Unknown
  Encodes 16S rRNA from Roseburia
agagtttgatcctggctcaggatgaacgctggcggcgtgcttaacacatgcaagtcgaacgaagcacatggacggaattccttcggggaggaagaccatgtgactgagtggcggacgggtgagtaacgcgtgggtaacctacctcatacagggggataacagctggaaacggctgttaataccgcataagcgcacagggccgcatggtccggtgtgaaaaactcc

SEQ ID NO: 1488 - DNA, 225 bp, Unknown
  Encodes 16S rRNA from Clostridium XlVb
agagtttgatcatggctcaggatgaacgctggcggcgtgcttaacacatgcaagtcgaacgagagaagacgaaaagcttgctttttgtcctatcgagtggcggacgggtgagtaacgcgtgagtaacctgccccatactggggaataacgtttggaaacggacgctaataccgcataagcaggcggagggacatccctcagtttgaaaagatttatcggtatggg

SEQ ID NO: 1489 - DNA, 225 bp, Unknown
  Encodes 16S rRNA from Enterorhabdus
agagtttgatcctggctcaggatgaacgctggcggcgtgcctaacacatgcaagtcgaacggttaaaccgccctcgggcggacatagagtggcgaacgggtgagtaacacgtgaccaacctgccccgcgcaccgggacaaccgctggaaacggcggctaataccgggtactccggagggggcgcatgcccccgccgggagagctccggcggcgcgggatggggtc

SEQ ID NO: 1490 - DNA, 225 bp, Unknown
  Encodes 16S rRNA from Pedobacter
agagtttgatcctggctcaggatgaacgctagcggcaggcctaatacatgcaagtcgaacggtaaatgtcccttcggggacatgagagtggcggacgggtgcgtaacgcgtatgcaaccaacccccctcaccgggatagccggtggaaacgccggataagaccggatgcgcccatggggaggcatctccctgcgggcaaggcggcgacgcggagggggacgggca

SEQ ID NO: 1491 - DNA, 225 bp, Unknown
  Encodes 16S rRNA from Clostridium sensu stricto
agagtttgatcatggctcaggacgaacgctggcggcgtgcttaacacatgcaagtcgaacgagacttaagagcggaagtcttcggatggaaggtcataagtcgagtggcggacgggtgagtaacgcgtgagcaacctgtcttatacagggggataacactccgaaaggagcgctaataccgcataagaccacgatgccgcatggtatcggggtaaaaggagcgat

SEQ ID NO: 1492 - DNA, 225 bp, Unknown
  Encodes 16S rRNA from Clostridium XlVa
agagtttgatcatggctcaggatgaacgctggcggcgtgcttaacacatgcaagtcgaacggacttaggccaccgaactgaatttagcttgctattgaaggttcaccggtctaagttagtggcggacgggtgagtaacgcgtgggcaacctgcctttatccgggggataacagttagaaatgactgctaataccgcataagcgcacgaggaggcatctccttgtg

SEQ ID NO: 1493 - DNA, 225 bp, Unknown
  Encodes 16S rRNA from Clostridium III
agagtttgatcatggctcaggacgaacgctggcggcgcgcctaacacatgcaagtcgaacgggactagtgaccggagaatagatgaggttatctattttgcgatcactagttcagtggcggacgggtgagtaaagcatgagcaacctggctactagagggggatagcttttggaaacagaagataataccgcatacatcaaagatttcgcatgagatttttggaa

SEQ ID NO: 1494 - DNA, 225 bp, Unknown
  Encodes 16S rRNA from Desulfotomaculum
agagtttgatcatggctcaggacgaacgctggcggcgtgcttaatacatgcaagtcgaacggaagtaaagatttcggtttttactttagtggcgaacgggtgagtaacgcgtgaacaacctgactcgaagagggggataacaacgggaaactgttgctaataccgcataagaccacagaaccgcatgattcaggggtcaaagatttatcgctttgagaggggttc

SEQ ID NO: 1495 - DNA, 225 bp, Unknown
  Encodes 16S rRNA from Clostridium IV
agagtttgatcctggctcaggacgaacgctggcggcgtgcctaacacatgcaagtcgaacggaagcgtacattagaagttttcggatggaagatatacgttttagtggcggacgggtgagtaacgcgtgagtaacctgcctttcagagggggataacgttttgaaaagaacgctaataccgcataacgtaaaggagtcgcatggcttcattaccaaaggagcaat

SEQ ID NO: 1496 - DNA, 225 bp, Unknown
  Encodes 16S rRNA from Proteiniclasticum
agagtttgatcatggctcaggacgaacgctggcggcgtgcttaacacatgcaagtcgaacgagggatgggggagagcttgctctttttcattccgagtggcggacgggtgagtaacgcgtgaggaacctgtctttcacagggggataacgtaccgaaagggacgctaataccgcataagaccacagcaccgcatggtgaaggggtcaaaggaggaatccggtgga

SEQ ID NO: 1497 - DNA, 225 bp, Unknown
  Encodes 16S rRNA from Prevotella
agagtttgatcatggctcaggatgaacgctagctacaggcttaacacatgcaagtcgaggggcagcatgggagttgcttgcaacttctgatggcgaccggcgcacgggtgagtaacgcgtatccgaccttcccccaggtagggaacagcccggcgaaagtcggattaatgccctatagtctgcgaattgcgcatgttgtttgcagtaaagatttatcgccttggg

SEQ ID NO: 1498 - DNA, 225 bp, Unknown
  Encodes 16S rRNA from Faecalibacterium
agagtttgatcctggctcaggatgaacgctggcggcgtgcataacacattcaagtcgaacggagttgcgatggaaagaggcttcggccaatggaagttgtaacttagtggcggacgggtgagtaacgcgtgagcaacctacctatgcgcgggggacaacagttggaaacgactgctaataccgcataaatcatggtaaaggcatctttatcatggcaaagattaa

SEQ ID NO: 1499 - DNA, 225 bp, Unknown
  Encodes 16S rRNA from Microbacterium
agagtttgatcatggctcaggatgaacgctggcggcgtgcttaacacatgcaagtcgaacgatgaagctggagcttgctctggtggattagtggcgaacgggtgagtaacacgtgagcaacctgcccctgactctgggataacagccggaaacggctgctaataccggatatgcaccatgaacgcatgttctgtggtgggaaagatttttcggttggggatgggc

SEQ ID NO: 1500 - DNA, 225 bp, Unknown
  Encodes 16S rRNA from Leucobacter
agagtttgatcctggctcaggacgaacgctggcggcgtgcttaacacatgcaagtcgaacgatgaagcccagcttgctgggtggaagagtggcgaacgggtgagtaacacgtgagtaacctgcccttgactctgggataagcgctggaaacggcgtctaatactggatacgacctatcaccgcatggtgtgtgggtggaaagatttatcggttttggatggactc

SEQ ID NO: 1501 - DNA, 225 bp, Unknown
  Encodes 16S rRNA from Prevotella
agagtttgatcctggctcaggatgaacgctagctacaggcttaacacatgcaagtcgaggggtaacatgattggagcttgctctgattgatgacgaccggcgcacgggtgcgtaacgcgtatccaaccttccccctaccagggaatagcccgttgaaagacggattaatgccctatgttgtgtgataatggcatcagagttacacgaaagactttgtcggtatgg

SEQ ID NO: 1502 - DNA, 225 bp, Unknown
  Encodes 16S rRNA from Sphingobacterium
agagtttgatcatggctcaggatgaacgctagcggcaggcctaatacatgcaagtcgaacgggatccagatcaaagcttgctttggtttggtgagagtggcgcacgggtgcgtaacgcgtgagcaacctacccttgtcagggggatagcccggcgaaagtcggattaataccgcatgacatcattgagaggcatctttctatgatcaaagatttatcggacaagg

SEQ ID NO: 1503 - DNA, 225 bp, Unknown
  Encodes 16S rRNA from Fusibacter
agagtttgatcctggctcaggattaacgctggcggcgtgcctaacacatgcaagtcgagcgggaaatttgagagtgaagcttcggcggaacttttaaatggagagcggcggacgggtgagtaacgcgtaggtaacctgccctgcacagagggatagccactggaaacggtgattaatacctcataaaactgttttgccgcatgacaaaacagccaaagatttatc

SEQ ID NO: 1504 - DNA, 225 bp, Unknown
  Encodes 16S rRNA from Howardella
agagtttgatcctggctcaggataaacgctggcggcgcacataagacatgcaagtcgaacggaagtcgttattttagaagtggaaagaagatttatctgatagaagcagaagaaataacaatggctttagtggcggactggtgagtaacacgtaagcaacctggctattagaggggaataacagtgagaaatcattgctaataccgcataagcttgtaataccgc

SEQ ID NO: 1505 - DNA, 225 bp, Unknown
  Encodes 16S rRNA from Pedobacter
agagtttgatcatggctcaggatgaacgctagcggcaggcctaatacatgcaagtcgaacggtaaagtccccttcgggggattgagagtggcggacgggtgcgtaacgcgtatgcaaccaacccccctcaccgggatagccggtggaaacgccggataagaccggatgcgcccatggggaggcatctccctgcgggcaaggcggcgacgcggagggggacgggca

SEQ ID NO: 1506 - DNA, 225 bp, Unknown
  Encodes 16S rRNA from Caldilinea
agagtttgatcatggctcaggatgaacgctggcggcgtgcttaacacatgcaagtcgaacgtgagagatagcaatatcttgaaagtggcaaacgggtgagtaacacgtagataacctgcctcggagtgggggataaccacgggaaactgtggctaataccgcatagtcttgcggacacgggagtgtcggcaagtaaagctttagtgcttcgagaggggtctgcgt

SEQ ID NO: 1507 - DNA, 225 bp, Unknown
  Encodes 16S rRNA from Turicibacter
agagtttgatcctggctcaggatgaacgctggcggcgtgcctaatacatgcaagtcgaacggagcacttcggtgcttagtggcgaacgggtgagtaacacataaacaatctaccctgaagactgggataacggttggaaacgaccgctaataccggataggtaactctgaggcatcttagagttattaaagttgggttacaacactgcaggatgagtttatgtcg

SEQ ID NO: 1508 - DNA, 225 bp, Unknown
  Encodes 16S rRNA from Clostridium IV
agagtttgatcctggctcaggacgaacgctggcggcgtgcttaacacatgcaagtcgaacggtcttcttacgggtagcaatacttgtttgaagatagtggcggacgggtgagtaacgcgtgagcaacctgcccatcagaggggaatagcgtctggaaacggacgataataccgcataaaactgagtcaccgcatgatgacacagccaaaggagaaatccgctgat

SEQ ID NO: 1509 - DNA, 225 bp, Unknown
  Encodes 16S rRNA from Alistipes
agagtttgatcatggctcaggatgaacgctagcggcaggcctaacacatgcaagtcgaggggcagcgcggtgtagcaatacactggcggcgaccggcgcacgggtgcgtaacgcgtatgcaacccacccgcgacaggggcataacggggggaaacccccactaattccccgtaaggccgcgtccccgcatggggatgcggcgaaagccttcgggcggttgcggac

SEQ ID NO: 1510 - DNA, 225 bp, Unknown
  Encodes 16S rRNA from Clostridium XlVa
agagtttgatcatggctcaggatgaacgctggcggcgtgcttaatacatgcaagtcgaacggaagatacccagagcttgctcttgatatctttagtggcggacgggtgagtaacgcgtgggtaacctgcctcatacagggggataacagttagaaatgactgctaaaaccgcataacattgcagtgccgcatgatactgcgatcaaatatttataggtatgagat

SEQ ID NO: 1511 - DNA, 225 bp, Unknown
  Encodes 16S rRNA from Clostridium XlVa
agagtttgatcatggctcaggatgaacgctggcggcgtgcttaacacatgcaagtcgaacggagcttattaagaaagcggagcttgctccaatggatttttaagcttagtggcggacgggtgagtaacgcgtgggtaacctgccttgcacagggggacaacagttggaaacgactgctaataccgcataagccggtagcttcgcatgaagcatccggaaaagatt

SEQ ID NO: 1512 - DNA, 225 bp, Unknown
  Encodes 16S rRNA from Prevotella
agagtttgatcatggctcaggatgaacgctagctacaggcttaacacatgcaagtcgaggggaaacggaaggcggagcttgctttgcctagacgtcgaccggcggatgggtgcgtaacgcgtatccaacctgcccgtgtcccggggatagcccatggaaacgtggattaacacccgatggtcctgcgcttccgcatggcggcgcaggtaaacgtgagggacatgg

SEQ ID NO: 1513 - DNA, 225 bp, Unknown
  Encodes 16S rRNA from Clostridium XlVa
agagtttgatcctggctcaggatgaacgctggcggcgtgcctaacacatgcaagtcgaacgagggtcctaaacctgagattcgtcgaaggggagggaattccgagtggcggatgggtgagtaacgcgtggagaacctgccctttgctgggggataacaactggaaacggttgacaataccgcataagctcggttggccgcatgaccgaccgaggaaagatttatc

SEQ ID NO: 1514 - DNA, 225 bp, Unknown
  Encodes 16S rRNA from Butyricimonas
agagtttgatcctggctcaggatgaacgctagcgacaggcttaacacatgcaagtcgaggggcagcatgggggtggcaacacctctgatggcgaccggcgcactggtgagtaacacgtatgcgacctgccccgttccggggtatagaccagggaaacttggcgtaatcccccatgtgccctggggctgcatggccccatggtgaaaggttcgccgggacgggatg

SEQ ID NO: 1515 - DNA, 225 bp, Unknown
  Encodes 16S rRNA from Anaerovibrio
agagtttgatcctggctcaggacgaacgctggcggcgtgcttaacacatgcaagtcgaacggggcgaagaggagcttgctcttcctagcctagtggcaaacgggtgagtaacgcgtaggcaacctgcccttcagatggggacaacatttcgaaaggaatgctaataccgaatgatgtacattggtcgcatgactgatgcaccaaaggccgggcaaccggtcactg

SEQ ID NO: 1516 - DNA, 225 bp, Unknown
  Encodes 16S rRNA from Prevotella
agagtttgatcatggctcaggatgaacgctagctacaggcttaacacatgcaagtcgaggggcagcatgtcgtgtgcttgcacacgatgatggcgaccggcgcacgggtgagtaacgcgtatccaacctgcccatgactccgggatagcccgctgaaaagcggattaacaccggatgcggtcgaaagaggacatctgatttcgaccaaagcttcggcggtcatgg

SEQ ID NO: 1517 - DNA, 225 bp, Unknown
  Encodes 16S rRNA from Pseudoflavonifractor
agagtttgatcatggctcaggatgaacgctggcggcgtgcataacacattcaagtcgaacggactgattcgatagcttgctattgatgaaagttagtggcggacgggtgagtaacgcgtgagcaacctgcccctatgtgcgggataacgtctggaaacggacgctaataccgcataaaccaatcggaccgcatgatctggttggcaaagatttattgcataggga

SEQ ID NO: 1518 - DNA, 225 bp, Unknown
  Encodes 16S rRNA from Corynebacterium
agagtttgatcatggctcaggacgaacgctggcggcgtgcttaacacatgcaagtcgaacggaaaggcccagcttgctgggtgctcgagtggcgaacgggtgagtaacacgtgggtgatctgcccctaacttcgggataagcttgggaaactgggtctaataccggataggacaatcgtttagtgtcggttgtggaaagttttttcggttagggatgagcccgcg

SEQ ID NO: 1519 - DNA, 225 bp, Unknown
  Encodes 16S rRNA from Leucobacter
agagtttgatcatggctcaggacgaacgctggcggcgtgcttaacacatgcaagtcgaacgatgaagcctagcttgctgggtggaagagtggcgaacgggtgagtaacacgtgagtaacctgccccgaactctgggataagcgctggaaacggcgtctaatactggatatgcaccatggaggcatcttctgtggtgggaaagatttatcggttcgggatgggctc

SEQ ID NO: 1520 - DNA, 225 bp, Unknown
  Encodes 16S rRNA from Kerstersia
agagtttgatcctggctcagattgaacgctagcgggatgctttacacatgcaagtcgaacggcagcacgaggagcttgctccttggtggcgagtggcgaacgggtgagtaatatatcggaacatgcccagtagcgggggataactactcgaaagagtggctaataccgcatacgtcctacgggagaaagcaggggaccttcgggccttgcactattggagtggcc

SEQ ID NO: 1521 - DNA, 225 bp, Unknown
  Encodes 16S rRNA from Slackia
agagtttgatcctggctcaggatgaacgccggcggcgcgcctaacacatgcaagtcgagcggaggacctgtcttcggacaggcgatcagcggcgaacgggtgagtaacgcgtgggcaacctgccccccgcacgggaatagccccgggaaaccgggggtaatgcccgacggcccggcagaggggcatccctctgccggcgaagccatcgcggcgggggatgggccc

SEQ ID NO: 1522 - DNA, 225 bp, Unknown
  Encodes 16S rRNA from Lactococcus
agagtttgatcatggctcaggacgaacgctggcggcgtgcctaatacatgcaagttgagcgctgaaggttggtacttgtaccgactggatgagcagcgaacgggtgagtaacgcgtggggaatctgcctttgagcgggggacaacatttggaaacgaatgctaataccgcataaaaactttaaacacaagttttaagtttgaaagatgcaattgcatcactcaaa

SEQ ID NO: 1523 - DNA, 225 bp, Unknown
  Encodes 16S rRNA from Prevotella
agagtttgatcatggctcaggatgaacactagctacaggcttaacacatgcaagtcgaggggtaacatgattggagcttgctccgattgatgacgaccggcgcacgggtgcgtaacgcgtatccaaccttccccctaccagggaatagcccgttgaaagacggattaatgccctatgttgtgtgataatggcatcagagttacacgaaagactttgtcggtatgg

SEQ ID NO: 1524 - DNA, 225 bp, Unknown
  Encodes 16S rRNA from Clostridium IV
agagtttgatcctggctcaggacgaacgctggcggcgcgcctaacacatgcaagtcgaacggagagtgggttttgattctttcgggatgatgaattcatttcttagtggcggacgggtgagtaacacgtgagcaacctgccttgcagagcgggataacggttggaaacgatcgctaataccgcataacatatgattgtcgcatggctatcatatcaaagatttat

SEQ ID NO: 1525 - DNA, 225 bp, Unknown
  Encodes 16S rRNA from Prevotella
agagtttgatcctggctcaggatgaacgctagctacaggcttaacacatgcaagtcgaggggaaacggaagggaaagcttgctttccctagacgtcgaccggcggatgggtgcgtaacgcgtatccaacctgcccgtgtcccggggatagcccatggaaacgtggattaacacccgatggccctgcgcttccgcatggcggcgcaggtaaacgcgagggacatgg

SEQ ID NO: 1526 - DNA, 225 bp, Unknown
  Encodes 16S rRNA from Bacteroides
agagtttgatcctggctcaggatgaacgctagctacaggcctaacacatgcaagtcgcggggcagcattgaggtagcaatacctcagatggcgaccggcgcacgggtgcgtaacgcgtatccaacctggcccttactcgggtatagccctgcgaaagtaggattaatccccgatgttgtcaagatggagccttttttcttgaccaaagatttatcggtaagggat

SEQ ID NO: 1527 - DNA, 225 bp, Unknown
  Encodes 16S rRNA from Lactobacillus
agagtttgatcatggctcaggacgaacgctggcggcgtgcctaatacatgcaagtcgaacgaactctggtattgattggtgcttgcatcatgatttacatttgagtgagtggcgaactggtgagtaacacgtgggaaacctgcccagaagcgggggataacacctggaaacagatgctaataccgcataacaacttggaccgcatggtccgagtttgaaagatgg

SEQ ID NO: 1528 - DNA, 225 bp, Unknown
  Encodes 16S rRNA from Prevotella
agagtttgatcatggctcaggatgaacgctagctacaggcttaacacatgcaagtcgaggggcagcatgattctagcttgctagaattgatggcgaccggcgcacgggtgcgtaacgcgtatccaaccttcccgcgagtcaggcacagcccggcgaaagtcggattaattcctgatgttctcctttgacggcatcagagaaggagtaaagaatttttcgcttgcg

SEQ ID NO: 1529 - DNA, 225 bp, Unknown
  Encodes 16S rRNA from Clostridium XlVa
agagtttgatcctggctcaggatgaacgctggcggcgtgcctaacacatgcaagtcgaacggagtttatgaagttttcggactgagtaaacttagtggcggacgggtgagtaacgcgtgggtaacctgcctcatacagggggataacagttggaaacggctgctaaaaccgcataagcatacattgtcgcatgacagagtgtgaaaatatttataggtatgagat

SEQ ID NO: 1530 - DNA, 225 bp, Unknown
  Encodes 16S rRNA from Clostridium sensu stricto
agagtttgatcctggctcaggacgaacgctggcggcgtgcttaacacatgcaagtcgagcgaggatctcaccggaaggccttcgggccggaaggtaagattcgagcggcggacgggtgagtaacgcgtgagcgatctgtcccgcacagggggataacacttggaaacaggtgctaataccgcataagaccacgaggccgcatggccatggggtaaaaggagcgat

SEQ ID NO: 1531 - DNA, 225 bp, Unknown
  Encodes 16S rRNA from Syntrophococcus
agatttgatcctggctcaggatgaacgctggcggcgtgcctaacacatgcaagtcgagcggagtatgacgagtgcttgcacatgtcatacttagcggcggatgggtgaggaacgcgtggagaacctgcccctcacagggggataacagttggaaacgactgttaataccgcatatgctcacggtgccgcatggcacagggaggaaagatttcatcggtgagagat

SEQ ID NO: 1532 - DNA, 225 bp, Unknown
  Encodes 16S rRNA from Clostridium XlVa
agagtttgatcctggctcaggatgaacgctggcggcgtgcctaacacatgcaagtcgaacggaaattgctgattgaagctttcgggtggatttcagtaattttagtggcggacgggtgagtaacacgtgggtaacctgccctgtaccgggggataacagttggaaacggctgttaataccgcataagcgcacagcttcgcatgaagcagtgtgaaaaactccggt

SEQ ID NO: 1533 - DNA, 225 bp, Unknown
  Encodes 16S rRNA from Victivallis
agagtttgatcatggctcagaatgaacgctggcggcatggattaggcatgcaagtcgaacgagaaagcggcttcggccgcgagtaaagtggcgaaagggtgagtagcacgtggggaacctgccccggggaccggaacaagcctgtgaaaacgggtctgagaccggatgtcgccccggcccgcatgggccggaggcgaaagattaatcgccccgggatggccccgc

SEQ ID NO: 1534 - DNA, 225 bp, Unknown
  Encodes 16S rRNA from Bacteroides
agagtttgatcctggctcaggatgaacgctagctacaggcctaacacatgcaagtcgcggggcagcatgggcgtagcaatacgcctgatggcgaccggcgcacgggtgcgtaacgcgtatccaacctggcccttactcgggtatagccctgcgaaagtaggattaatccccgatgttgtcaagcgatagccttttcacttgaccaaagagtttttcggtaaggga

SEQ ID NO: 1535 - DNA, 225 bp, Unknown
  Encodes 16S rRNA from unknown taxa
agagtttgatcctggctcaggatcaacgctggcggcgtgcctaatgcatgcaagtcgagcggggtgtccttcggggcgcttacgcggcggacgggtgcggaacacgtgggcaacctgccctgaggtgggggatagccggtggaaacaccgggtaattccgcatacggtcacggaccggggggtctgtgaggaaaggctcgtaagagtcgccttgggaggggcctg

SEQ ID NO: 1536 - DNA, 225 bp, Unknown
  Encodes 16S rRNA from Clostridium XlVa
agagtttgatcctggctcaggatgaacgctggcggcgtgcctaacacatgcaagtcgaacgaagcatgctggaaagagaccttcggggaaccggaaatcatgacttagtggcggacgggtgagtaacgcgtgggcaacctgccgtacacagggggacaacagctggaaacggctgctaataccgcataagcgcacagcttcgcatggagcggtgtgaaaagcatt

SEQ ID NO: 1537 - DNA, 225 bp, Unknown
  Encodes 16S rRNA from Prevotella
agagtttgatcatggctcaggatgaacgctagctacaggcttaacacatgcaagtcgaggggcagcatggcggtagcaataccgccgatggcgaccggcgcacgggtgagtaacgcgtatccaaccttccccctggtagggcatagcccggcgaaagtcggattaataccctatgttttcctttgacggcatccgacgaggaacaaagatttatcgcccggggat

SEQ ID NO: 1538 - DNA, 225 bp, Unknown
  Encodes 16S rRNA from unknown taxa
agagtttgatcctggctcagaacgaacgctggtagcgtggattaggcatgcaagtcgaacgggatcagccggttagcaataattggctgtgagagtggcggattggggaggaacacgtgagcaacctgcccttgagttggggaaaaccgttggaaacgacggctaataccggatgtggcgcccggagacatcttcggagcgctaaagggggccgcaaggctcccg

SEQ ID NO: 1539 - DNA, 225 bp, Unknown
  Encodes 16S rRNA from Clostridium XlVa
agagtttgatcatggctcaggatgaacgctggcggcgtgcctaacacatgcaagtcgaacgaagaccccgaagcggaaatttcggttgaagtggagggaggactgagtggcggacgggtgagtaacgcgtggataacctgccccatacagggggatagcagttggaaacgactgataataccgcatgagcgcacgtggagacatctccatgtgtgaaaagaaata

SEQ ID NO: 1540 - DNA, 225 bp, Unknown
  Encodes 16S rRNA from Treponema
agagtttgatcatggctcagaacgaacgctggcggcgcgtcttaagcatgcaagtcgagcgggaatagaggtgcttgcacttctatgagagcggcggactggtgagtaacacgtaggcaacgtacccttcggacggggatagccggcagaaatgtcgggtaataccggatgtgaacttacttcgtgaaggagtaagtggaaaggagcttcggctccgccggagga

SEQ ID NO: 1541 - DNA, 225 bp, Unknown
  Encodes 16S rRNA from Pyramidobacter
agagtttgatcctggctcaggatgaacgctggcggcgtgcttaacacatgcaagttgcgcggggatctgacgatgagacttcggtggatttgttagatcctagcggcggacgggtgagtaaagcacaaggacgtgtccgagcgaggggggcaactgcgggaaaccgtagctaataccccgtaagccgagaggtgaaagcagcaatgcgcgagcggagcgacttgt

SEQ ID NO: 1542 - DNA, 225 bp, Unknown
  Encodes 16S rRNA from Robinsoniella
agagtttgatcctggctcaggatgaacgctggcggcgtgcctaacacatgcaagtcgaacggggtgtcaatcttcggaaagacacttagtggcggacgggtgagtaacgcgtgggtaacctgcctcatacagggggatagcagttggaaacgactgataataccgcataagcgcacagcatcgcatgatgcagtgtgaaaaactccggtggtatgagatggaccc

SEQ ID NO: 1543 - DNA, 225 bp, Unknown
  Encodes 16S rRNA from Lachnospiracea incertae sedis
agagtttgatcatggctcaggatgaacgctggcggcgtgcttaacacatgcaagtcgagcgaagcactctggaagattccttcgggatgattccttagtgacttagcggcggacgggtgagtaacgcgtgggcaacctgccttgtacagggggataacagttagaaatgactgctaataccgcataagcacacagcatggcatcatgcagtgtgaaaaactccgg

SEQ ID NO: 1544 - DNA, 225 bp, Unknown
  Encodes 16S rRNA from Clostridium XI
agagtttgatcctggctcaggacgaacgctggcggcgtgcctaacacatgcaagtcgagcgaggatttagcggaaggaagcttcggcagagagaaggtaaatcttagcggcggacgggtgagtaacgcgtgaacaatctgtcccggacagggggataacacatggaaacaggtgctaataccgcataagaccacagcgtcgcatggcggtggggtaaaaggagaa

SEQ ID NO: 1545 - DNA, 225 bp, Unknown
  Encodes 16S rRNA from Bifidobacterium
agagtttgatcatggctcaggatgaacgctggcggcgtgcttaacacatgcaagtcgaacgggatccctggcagcttgctgccggggtgagagtggcgaacgggtgagtaatgcgtgaccgacctgccccatgcaccggaatagctcctggaaacgggtggtaatgccggatgttccacatgagcgcatgcgagtgtgggaaaggctttttgcggcatgggatgg

SEQ ID NO: 1546 - DNA, 225 bp, Unknown
  Encodes 16S rRNA from Bacteroides
agagtttgatcctggctcaggatgaacgctagctacaggcttaacacatgcaagtcgaggggcagcggggagtggcaacactctgccggcgaccggcgcacgggtgagtaacacgtatccaacctgccctgagcttggggatagccctctgaaaggaggattaatacccgatgtggttgtttggcgacatcgcctttcaattaaagatttatcggctcatgatgg

SEQ ID NO: 1547 - DNA, 225 bp, Unknown
  Encodes 16S rRNA from Gordonibacter
agagtttgatcatggctcaggatgaacgctggcggcgtgcttaacacatgcaagtcgaacgattaaaccggctccggccggaaatagagtggcgaacgggtgagtaacacgtgaccaacctgccccgcgcaccgggacagcctcgcgaaagcgggattaataccggatactccggcggcgcgggatggggtcgcggcccatcaggtagtgggtcgggtagaggcc

SEQ ID NO: 1548 - DNA, 225 bp, Unknown
  Encodes 16S rRNA from Enterorhabdus
agagtttgatcatggctcaggatgaacgctggcggcgtgcctaacacatgcaagtcgaacggttaagccggcttcggccgggaataaagtggcgaacgggtgagtaacacgtgaccaacctgccccgcgcaccgggacagccccccgaaagggggattaataccggatactccgcggcccccgcatgggggccgcgggaaagctccggcggcgcgggatggggtc

SEQ ID NO: 1549 - DNA, 225 bp, Unknown
  Encodes 16S rRNA from Lactobacillus
agagtttgatcctggctcaggacgaacgctggcggcgtgcctaatacatgcaagtcgaacgagtttgcttttaatgaaggcggtgcttgcaccaactgatttaaaaataaacgagtggcggacgggtgagtaacacgtgggtaacctaccctaaagtgggggataacatttggaaacagatgctaataccgcataatattaaaaaccacatggtttttaattgaa

SEQ ID NO: 1550 - DNA, 225 bp, Unknown
  Encodes 16S rRNA from Bacteroides
agagtttgatcatggctcaggatgaacgctagctacaggcttaacacatgcaagtcgaggggcagcataggggaggtttcggccacccccgatggcgaccggcggatgggtgagtaacgcgtatccaacctgcccctgtcccggggacagcccttagaaatgaggattaacccccgatggcgcggagaggccgcatggcttttccgccaaatgcgaaggacaggg

SEQ ID NO: 1551 - DNA, 225 bp, Unknown
  Encodes 16S rRNA from Prevotella
agagtttgatcatggctcaggatgaacgctagctacaggcttaacacatgcaagtcgaggggcatcaggacggtagcttgctatcgttgctggcgaccggcgcacgggtgcgtaacacgtatcgaacctacctgccgctcggggatagccctctgaaaggaggattaatacccgatggtttccaatggggacatccccgttggaataaagattcattggcggcgg

SEQ ID NO: 1552 - DNA, 225 bp, Unknown
  Encodes 16S rRNA from Tannerella
agagtttgatcatggctcaggatgaacgctagcgacaggcctaacacatgcaagtcgagggagaagttagaagtagcttgctacggaagatggaaaccggcgcacgggtgcgtaacaggtgtgcaatctgtccatagtcggggaatagcccagcgaaagttggattaaagctccatgtgagtgagaatcgcatgtttttcacttgaaacgtaaggactatgggtg

SEQ ID NO: 1553 - DNA, 225 bp, Unknown
  Encodes 16S rRNA from Bacteroides
agagtttgatcctggctcaggatgaacgctagctacaggcttaacacatgcaagtcgaggggcatcaggggactagcttgctagtcctgctggcgaccggcgcacgggtgagtaacacgtatccaacctgcccccagcttggggatagccctctgaaaggaggattaatacccgatatgcttgttctccggcatcggaggacaatcaaagattcatcggctgtgg

SEQ ID NO: 1554 - DNA, 225 bp, Unknown
  Encodes 16S rRNA from Prevotella
agagtttgatcatggctcaggatgaacgctagcggcaggcttaacacatgcaagtcgaggggcagcgcggagtagcaatactttggcggcgaccggcggaagggtgcgtaacgcgtgagcaacctgcccgtgtccggggcataatcggtggaaacgccgtctaattccccatacgttgctgggcgacatcgcttagtaatgaaaacttattgcggacacggatgg

SEQ ID NO: 1555 - DNA, 225 bp, Unknown
  Encodes 16S rRNA from Clostridium XlVb
agagtttgatcatggctcaggatgaacgctggcggcgtgcctaacacatgcaagtcgaacgagagaggcgaagagcttgctttttgccaatcgagtggcggacgggtgagtaacgcgtgagcaacctgccttacattggggaataacgtttggaaacggacggtaataccgcatatgcagacaagtacggcatcgtacggtttggaaagatttatcgatgtaaga

SEQ ID NO: 1556 - DNA, 225 bp, Unknown
  Encodes 16S rRNA from Gelidibacter
agagtttgatcatggctcaggataaacgctagcggcaggcctaacacatgcaagtcgagcggcagcgggagtggcaacacttgccggcgagcggcggacgggtgagtaacgcgtatgcaacctgcccaccacacggagatagccgaccgaaaggacgattaaactccgatggcattgggactcggcatcgggatccaattaaatatttataggtggtggatgggc

SEQ ID NO: 1557 - DNA, 225 bp, Unknown
  Encodes 16S rRNA from unknown taxa
agagtttgatcatggctcaggatgaacgctggcggcgtgcttcatacatgcaagtcgaacgtgaagctgacttcggtcagtggaaagtggcggacgggtgagtaatacataggaaatctgcccttagctgggggacaacagttggaaacgactgctaataccgcatatgagcttagctgaaatgctaatcttgaaaactacggtggctaaggatgagcctgtgcc

SEQ ID NO: 1558 - DNA, 225 bp, Unknown
  Encodes 16S rRNA from Rhodoplanes
agagtttgatcatggctcagaacgaacgctggcggcaggcttaacacatgcaagtcgaacgccccgcaaggggagtggcagacgggtgagtaacacgtgggaacgtgccttttggttcggaacaacttcgggaaactggagctaataccggataagcccttcgggggaaagatttatcgccaaaagatcggcccgcgtctgattagctagttggtggggtaatgg

SEQ ID NO: 1559 - DNA, 225 bp, Unknown
  Encodes 16S rRNA from Selenomonas
agagtttgatcatggctcaggacgaacgctggcggcgtgcttaacacatgcaagtcgaacgagacggatagaagcttgcttttagaagtcgagtggcaaacgggtgagtaacgcgtagacaacctgcctctgggatggggacaacagcccgaaagggctgctaataccgaatgaaatggtttcttctcctgaagttatcatgaaagatggcctctatttataagc

SEQ ID NO: 1560 - DNA, 225 bp, Unknown
  Encodes 16S rRNA from Escherichia/Shigella
agagtttgatcatggctcagattgaacgctggcggcaggcctaacacatgcaagtcgaacggtaacaggaagcagcttgctgcttcgctgacgagtggcggacgggtgagtaatgtctgggaaactgcctgatggagggggataactactggaaacggtagctaataccgcataatgtcgcaagaccaaagagggggaccttcgggcctcttgccatcggatgtg

SEQ ID NO: 1561 - DNA, 225 bp, Unknown
  Encodes 16S rRNA from Rikenella
agagtttgatcctggctcaggatgaacgctagcggcaggcttaacacatgcaagtcgaggggcagcaggccgggtagcaatacttggtgctggcgaccggcgcacgggtgcgtaacgcgtatgcaacctgcccgtaacaggggtataacggagggaaacttccactaatcccccatattgtcactttttcgcatggggaggtgacgaaagcttaattgtggttac

SEQ ID NO: 1562 - DNA, 225 bp, Unknown
  Encodes 16S rRNA from Coprococcus
agagtttgatcatggctcaggatgaacgctggcggcgtgcttaacacatgcaagtcgaacggaacattccacccgaagattgaagaagcttgcttcggattgattcaaccggaatgtttagtggcggacgggtgagtaacgcgtgggtaacctaccttacacagggggataacagttagaaatgactgctaataccgcataagcgcacggtaccgcatggtacag

SEQ ID NO: 1563 - DNA, 225 bp, Unknown
  Encodes 16S rRNA from Clostridium sensu stricto
agagtttgatcctggctcaggacgaacgctggcggcgcgcctaacacatgcaagtcgaacgggactagtgaccggagcttagaatttctctaggttgcgttcactagttcagtggcggacgggtgagtaaagcatgagtaactttcccattagtggggaatagcttttggaaacagaagataataccgcatacatcgttgaggactcatgttctcttcggaaaag

SEQ ID NO: 1564 - DNA, 225 bp, Unknown
  Encodes 16S rRNA from Hyphomicrobium
agagtttgatcctggctcagaacgaacgctggcggcaggcctaacacatgcaagtcgaacgctgtagcaatacagagtggcagacgggtgagtaacacgtgggaatcttcctatcggtacggaatagctcagggaaacttggggtaataccgcatacgcccttcgggggaaagatttatcgccgatagatgagcccgcgtctgattagctagttggtgaggtaat

SEQ ID NO: 1565 - DNA, 225 bp, Unknown
  Encodes 16S rRNA from Erysipelotrichaceae incertae sedis
agagtttgatcatggctcaggatgaacgctggcggcatgcctaatacatgcaagtcgaacgaagcgacctcaacagaattgtgcttgcacaaggaagatgagattctcgcttagtggcgaacgggtgagtaacacgtaggtaacctgcccatctacctgggacaacagttagaaatgactgctaaaaccggataggtaacattgaggcatctcgatgttattaaa

SEQ ID NO: 1566 - DNA, 225 bp, Unknown
  Encodes 16S rRNA from unknown taxa
agagtttgatcctggctcagaacgaacgctggtagcgtggattaggcatgcaagtcgaacgggatcaccgatatagtaatattgaggtgtgagagtggcggattggggaggaacacgtgagcaacctgccttggagtcggggaaaaccgttggaaacgacggctaataccggatgtggcgcccggtgacatcaccggagcgctaaagggggccgcaaggctctcg

SEQ ID NO: 1567 - DNA, 225 bp, Unknown
  Encodes 16S rRNA from Staphylococcus
agagtttgatcctggctcaggatgaacgctggcggtatgcctaatacatgcaagtcgagcgagagacttcggtctctagcggcgaacgggtgagtaacaagttggtaatctgcctattagttggggatacccaggcgaaagcttggctaataccgtaatacgtaataagctgaaatgcttattataaaaggcgcttcggcgtcgctaatagatgagcctgcttct

SEQ ID NO: 1568 - DNA, 225 bp, Unknown
  Encodes 16S rRNA from unknown taxa
agagtttgatcatggctcagaacgaacgctggtagcgtggattaggcatgcaagtcgaacgggatccatgaagtagcaatacggattggtgagagtggcggaagggcgaggaacacgtgggcaacctgtccaggaggtggggaaaacctcgggaaactgaggctaataccgaatgtggcgcccgcacgcatgtgcggagcgccaaagggggcgaaagctccccct

SEQ ID NO: 1569 - DNA, 225 bp, Unknown
  Encodes 16S rRNA from Victivallis
agagtttgatcctggctcagaacgaacgctggcggcatggattaggcatgcaagtcgaacgaagtagcaatacttagtggcgcaagggtgaggaacacgtgagtgacctgcccgcaagtttggaacagctcctggaaacgggaattaataccggatgtgatcatattgctgcatggtgatatgattaaagcagtaatgcgcttgcggatgggctcgcgtcccatt

SEQ ID NO: 1570 - DNA, 225 bp, Unknown
  Encodes 16S rRNA from Selenomonas
agagtttgatcctggctcaggacgaacgctggcggcgtgcttaacacatgcaagtcgaacgagggaattcttttcggagaatataccgagtggcaaacgggtgagtaacgcgtaggcaacctgccttcaagatggggacaacagtccgaaagggctgctaataccgaatgacatgtctgaaccgcatgggacggacagcaaagacggcctccaaactatgctgtc

SEQ ID NO: 1571 - DNA, 225 bp, Unknown
  Encodes 16S rRNA from Desulfobulbus
agagtttgatcctggctcagaacgaacgctggcggcgtgcttaacacatgcaagtcgaacgcgaaagcggcttcggccgtgagtagagtggcgcacgggtgagtaacgcgtagataacctgtcttcatatccgggataacacgccgaaaggggtactaataccggatatactcgcatttcaataggtgaggcgaggaaaggtggcctctgattcaagctactgta

SEQ ID NO: 1572 - DNA, 225 bp, Unknown
  Encodes 16S rRNA from Clostridium III
agagtttgatcctggctcaggacgaacgctggcggcgtgcctaacacatgcaagtcgagcggagccaattgacggatcccttcggggtgaagacgaggaagcttagcggcggacgggtgagtaacgcgtgagtaacctgcctgtaagagggggataattcctggaaacggggactaataccgcatattgagcacatatcgcatggtatatgcttgaaagatttat

SEQ ID NO: 1573 - DNA, 225 bp, Unknown
  Encodes 16S rRNA from Spirochaeta
agagtttgatcatggctcagaacgaacgctggcggtgcgttttaagcatgcaagttgagcggcagtagtagcaatactatgagagcggcggacgggtgagtaacacgtggataatctaccttgaagtttggaatataccgtggaaacacggagtaataccggataagacggtacttggggacaagtattgggaaaggtgctacggcatcgctttaagatgagtcc

SEQ ID NO: 1574 - DNA, 225 bp, Unknown
  Encodes 16S rRNA from Kordia
agagtttgatcctggctcaggataaacgctagcggcaggcctaacacatgcaagtcgagcggtaacacggtgtagcaatacattggtgacgagcggcggacgggtgagtaacgcgtatgcaacctacccactacacaaggatagccttccgaaaggaggattaatacttgatagtactctaagatggcatcaaaacagagttaaagatttatcggtagtggatgg

SEQ ID NO: 1575 - DNA, 225 bp, Unknown
  Encodes 16S rRNA from Bosea
agagtttgatcctggctcagagcgaacgctggcggcaggcttaacacatgcaagtcgaacgcatccttcgggatgagtggcagacgggtgagtaacacgtgggaacgtacctctttgttcggaataactcatggaaacgtgagctaataccggatacgcccttttggggaaagatttatcgcagagagatcggcccgcgtctgattagctagttggtgaggtaat

SEQ ID NO: 1576 - DNA, 225 bp, Unknown
  Encodes 16S rRNA from Enterococcus
agagtttgatcctggctcaggacgaacgctggcggcgtgcctaatacatgcaagttgaacgcttctttctgatcgaacttcggttcaccaagaaagaagagtagcgaacgggtgagtaacacgtgggtaacctgcccatcagcgggggataacacttggaaacaggtgctaataccgcataatactttttctctcatgagtgaaagttgaaaggcgcttttgcgt

SEQ ID NO: 1577 - DNA, 225 bp, Unknown
  Encodes 16S rRNA from Clostridium III
agagtttgatcatggctcaggacgaacgctggcggcgtgcctaacacatgcaagtcgaacggagctatttagacagaacccttcggggggaagattacttagcttagtggcggacgggtgagtaacgcgtgagtaacctgcccataagagggggataacacagagaaatttgtgctaataccgcatatagatataatatcgcatggtaatgtattgaaagattta

SEQ ID NO: 1578 - DNA, 225 bp, Unknown
  Encodes 16S rRNA from Xanthobacter
agagtttgatcatggctcagagcgaacgctggcggcaggcctaacacatgcaagtcgagcgcccagcaatgggagcggcagacgggtgagtaacgcgtggggatctacccattggtacggaataacccagggaaacttggactaataccgtatgtgtccttcgggagaaagatttatcgccaatggatgaacccgcgtctgattagctagttggtgaggtaaagg

SEQ ID NO: 1579 - DNA, 225 bp, Unknown
  Encodes 16S rRNA from Lactobacillus
agagtttgatcatggctcaggacgaacgctggcggcatgcctaatacatgcaagtcgaacgagttcccgttgattgacgtgcttgcactgatttcaacattggaacgagtggcgaactggtgagtaacacgtggaaaacctgcccagaagcaggggataacacttggaaacaggtgctaataccgtataacaacaaaaaccgcatggtttttgtttgaaaggtgg

SEQ ID NO: 1580 - DNA, 225 bp, Unknown
  Encodes 16S rRNA from Prevotella
gctttgatcatggctccggatgcacgctcgctccaggcttaacacatgccagtcgaggggtaacggcagtgaagcttgctttactggccgacgaccggcgcacgggtgagtaacgcgtatccaacctgcccatgactcagggataacctttcgaaagggagcctaatacctgatgttgtgagacgagggcatctgagtgtcaccaaagattcatcggtcatggat

SEQ ID NO: 1581 - DNA, 225 bp, Unknown
  Encodes 16S rRNA from Acidaminococcus
agagtttgatcatggctcaggacgaacgctggcggcgtgcttaacacatgcaagtcgaacgggaaacttatttcggtaagtttctagtggcgaacgggtgagtaacgcgtgggtaacctgccctccagatggggacaacattccgaaagggatgctaataccgaatacgatccctccaccgcatggaggagggatgaaagatggcctctgcttgcaagctatcgc

SEQ ID NO: 1582 - DNA, 225 bp, Unknown
  Encodes 16S rRNA from Eubacterium
aggtttgatcctggctcaggatgaacgctggcggcgtgcctaacacatgcaagtcgagcgagaaacctatgtgatgaaacttcggtagaatcttttaggtggaaagcggcggacgggtgagtaacgcgtaggcaacctgcccctagcagggggatagccattggaaacgatgattaaaaccccataatgcagatttatcacatgttggatctgccaaagatttat

SEQ ID NO: 1583 - DNA, 225 bp, Unknown
  Encodes 16S rRNA from Bacteroides
agagtttgatcctggctcaggatgaacgctagctacaggcttaacacatgcaagtcgaggggcagcatgatcgaagcttgctttgatcgatggcgaccggcgcacgggtgcgtaacacgtatccaatctacccaccgctcagggatagccttgcgaaagtaagattaatacctgatggtttccttatgtggcatcatgtatggaataaagattcatcggcgatgg

SEQ ID NO: 1584 - DNA, 225 bp, Unknown
  Encodes 16S rRNA from Clostridium XlVa
agagtttgatcctggctcaggataaacgctggcggcgcacataagacatgcaagtcgaacgaacgacttcaaattgttttactttttgaagaagttagtggcggactggtgaggaacacgtaaacaatctgcctataagaggggaacaacattgagaaatcagtgctaataccgcataagcctacgctatcgcatgataaagtaggaaaaggagtaatccgctta

SEQ ID NO: 1585 - DNA, 225 bp, Unknown
  Encodes 16S rRNA from Lactobacillus
agagtttgatcctggctcaggacgaacgctggcggcatgcctaatacatgcaagtcgaacgagcttccgttgaatgacgtgcttgcactgattttaacaatgaagcgagtggcgaactggtgagtaacacgtgggaaatctgcccagaagcaggggataacacttggaaacaggtgctaataccgtataacaacaaaatccgcatggattttgtttgaaaggtgg

SEQ ID NO: 1586 - DNA, 225 bp, Unknown
  Encodes 16S rRNA from Devosia
agagtttgatcctggctcagaacgaacgctggcggcaggcttaacacatgcaagtcgaacggtctcttcggaggcagtggcagacgggtgagtaacgcgtgggaatctacctagttctacggaacaacagttggaaacgactgctaataccgtatacgccctatgggggaaagatttatcggaattagatgagcccgcgtaagattagctagttggtgaggtaat

SEQ ID NO: 1587 - DNA, 225 bp, Unknown
  Encodes 16S rRNA from Pedobacter
agagtttgatcatggctcaggatgaacgctagcggcaggcttaacacatgcaagtcgaggggcagcgcgggggtagcaatacacctggcggcgaccggcggaagggtgcgtaacgcgtgagcaacatgcccgtcacagggggataaaagatggaaacgtctcctaataccccgtaacatcatttgtggcatcgcagatggttgaaagctattatgcggtgacgga

SEQ ID NO: 1588 - DNA, 225 bp, Unknown
  Encodes 16S rRNA from Clostridium IV
agagtttgatcctggctcaggacgaacgctggcggcgtgcttaacacatgcaagtcgaacgggactgcccgaatgaagttttcggatggaatttgggtatgtttagtggcgaacgggtgagtaacgcgtgagtaacctgccttggagagggggacaacagccggaaacggctgctaataccgcatgacgtcacgggagggcatccttctgtgaccaaagatttat

SEQ ID NO: 1589 - DNA, 225 bp, Unknown
  Encodes 16S rRNA from Clostridium XlVa
agagtttgatcatggctcaggatgaacgctggcggcgtgcctaacacatgcaagtcgaacgaagcacttctcccgttgaagttgattagcttgctatgaagcggaaacatttgaagtgacttagtggcggacgggtgagtaacgcgtgggtaacctgccctgtactgggggacaacagttggaaacggctgctaataccgcataagcgcacagcatcgcatggtg

SEQ ID NO: 1590 - DNA, 225 bp, Unknown
  Encodes 16S rRNA from Corynebacterium
agagtttgatcatggctcaggatgaacgctggcggcgtgcttaacacatgcaagtcgaacggaaaggccttgtgcttgcacaaggtactcgagtggcgaacgggtgagtaacacgtgggtgatctgccctgcactgtgggataagcctgggaaactgggtctaataccatataggaccgcactttggatggtgtggtggaaagcttttgcggtgtgggatgagcc

SEQ ID NO: 1591 - DNA, 225 bp, Unknown
  Encodes 16S rRNA from Spirochaeta
agagtttgatcctggctcagaacgaacgctggcggcgcgtcttaagcatgcaagtcgagcgggattatggtgcttgcaccatatgagagcggcggactggtgagtaacgcgtaggtgacgaaccccccggacggggacagcctctagaaatagagggtaataccggatgaggcgtgcagtgttagaggctgcacgtgaaagcagctccggctgcgccgggggatc

SEQ ID NO: 1592 - DNA, 225 bp, Unknown
  Encodes 16S rRNA from Anaeroplasma
agagtttgatcatggctcaggatgaacgctggcggcgtgcctaatacatgcaagtcgaacgaggtttctcttcggggaaaccgagtggcgaacgggtgagtaacacataggtaatctacctttcagaatgggatacccaagagaaattttggctaataccgtatacaatcatttctccgcatggagatttgatgaaaggggctccaaagcctcgctgttagatga

SEQ ID NO: 1593 - DNA, 225 bp, Unknown
  Encodes 16S rRNA from Clostridium XlVa
agagtttgatcatggctcaggatgaacgctggcggcgtgcttaacacatgcaagtcgaacgaggaatttcagatgaagttttcggatggattctggctttccgagtggcggacgggtgagtaacgcgtgggtaacctgccttacacagggggacaacagccggaaacggctgctaataccgcataacctgctagagtcgcatgactcagacagaaaagatttatc

SEQ ID NO: 1594 - DNA, 183 bp, Unknown
  Encodes 16S rRNA from Lachnospiracea incertae sedis
agagtttgatcatggctcaggataaacgctggcggcgtgctttggacaatgggggcaaccctgatccagcgacgccgcgtgaacgaagaagtatctcggtatgtaaagttctatcagcagggaagataatgacggtacctgactaagaagcaccggctaaatacgtgccagcagccgcgtaat

SEQ ID NO: 1595 - DNA, 225 bp, Unknown
  Encodes 16S rRNA from Saccharofermentans
agagtttgatcatggctcaggacgaacgctggcggcgtgcctaacacatgcaagtcgagcgaggacaatggtttcggctgttgttcgagcggcggacgggtgagtaacgcgtgaacaatctgtccctgacagggggataacacttggaaacaggtgctaataccgcataagaccacgggatcgcatggtactggggtcaaaggagcaatccggtgaggggtgagt

SEQ ID NO: 1596 - DNA, 225 bp, Unknown
  Encodes 16S rRNA from Slackia
agagtttgatcatggctcaggatgaacgccggcggcgcgcctaacacatgcaagtcgagcggcggaccggctccggccggcgagcagcggcgaacgggtgagtaacgcgtgggcaacctgccccccccctcgggaatagcggccggaaacggccggtaatgcccgacggcccccgggagaggcatctcccccggggcaaagccctggcggggggggatgggcccg

SEQ ID NO: 1597 - DNA, 225 bp, Unknown
  Encodes 16S rRNA from Limibacter
agagtttgatcatggctcaggatgaacgctggcggcaggcctaatacatgcaagtcgcacgggatcgctccttcgggggcgtgagagtggcggacgggtgcgcaacgcgtatgcaaccagccccctgcaggcggatagccggtggaaacgccggataatacgccatgtttcgggtagagggcatcctttacctgagaaagcggagacgcggcgggggacgggcat

SEQ ID NO: 1598 - DNA, 225 bp, Unknown
  Encodes 16S rRNA from Sphingobium
agagtttgatcatggctcagagcgaacgctagcggcatgctttatacatgcaagtcgaacgaacgagtttatattgagtagcaatacgatttataaatgagttagtggcgaacgggtgagtaatatataggaatttgcccagtagtgggggacaacagttagaaatgactgctaataccgcatacgtccgagaggagaaagatttatcgctattggagaagccta

SEQ ID NO: 1599 - DNA, 225 bp, Unknown
  Encodes 16S rRNA from Clostridium XlVa
agagtttgatcatggctcaggatgaacgctggcggcgtgcttaacacatgcaagtcgaacgaagcatctttatatgatccctttggggtgatgaattgatgactgagtggcggacgggtgagtaacgcgtgggaaacctgccctgtaccgggggatagcagttggaaacggctgataataccgcataagcgcacagtaagacatcttaccgtgtgaaaaactccg

SEQ ID NO: 1600 - DNA, 225 bp, Unknown
  Encodes 16S rRNA from Riemerella
agagtttgatcatggctcaggatgaacgctagcgggaggcctaacacatgcaagccgagcgggatttagtagttagcttgctaactactgatgagagcggcgtacgggtgcggaacacgtgtgcaacctgcctttatctgggagatagcctttcgaaaggaagattaatatcccataatatattgattggcatcgattaatattgaaagctccggcggataaaga

SEQ ID NO: 1601 - DNA, 225 bp, Unknown
  Encodes 16S rRNA from Saccharofermentans
agagtttgatcatggctcaggacgaacgctggcggcgtgcctaacacatgcaagtcgagcggactttcatcaggaaggtgcttgcaccggaaagatggaagttagcggcggacgggtgagtaacgcgtgagcaatctgtcccatacagggggataataccgcgaaagaggttctaataccgcatgagaccacagtgaggcatctcacaggggtcaaaggagcaat

SEQ ID NO: 1602 - DNA, 225 bp, Unknown
  Encodes 16S rRNA from Bacteroides
agagtttgatcctggctcaggatgaacgctagctacaggcttaacacatgcaagtcgaggggcagcaggagattagcttgctaatcttgctggcgaccggcgcacgggtgagtaacgcgtatccaacctgccccgtactcggggacagccctctgaaaggaggattaatacccgatattgtcgctgtgggacatcccatggtgacgaaagattcatcggtacggc

SEQ ID NO: 1603 - DNA, 225 bp, Unknown
  Encodes 16S rRNA from Prevotella
agagtttgatcatggctcaggatgaacgctagctacaggcttaacacatgcaagtcgaggggcagcacggggtatggcttgccataccctggtggcgaccggcgcacgggtgagtaacgcgtatccaacctgcccgcaaccgcggaatagcccgccgaaaggcggattaatgccgcatgagctcgcgtgggggcatctgcccgcgagcaaaggtccattccggtt

SEQ ID NO: 1604 - DNA, 225 bp, Unknown
  Encodes 16S rRNA from Selenomonas
agagtttgatcctggctcaggacgaacgctggcggcgtgcttaacacatgcaagtcgaacggggcgattgaaagcttgcttttatgagcctagtggcaaacgggtgagtaacgcgtgggcaacctaccggaaagatggggacaacatcccgaaaggggtgctaataccgaatgttgtatatgaggcgcatgcttcatatattaaaggattctatccgctttccga

SEQ ID NO: 1605 - DNA, 225 bp, Unknown
  Encodes 16S rRNA from Victivallis
agagtttgatcctggctcagaacgaacgctggcggcatggattaggcatgcaagtcgaacgaagcagcaatgcttagtggcgcaagggtgaggaacgcgtgagtgacctacccgcaagtttggaacagctcctggaaacgggaattaataccggatgtgatcatagggctgcatggttttatgattaaagcagcaatgcgcttgcggatgggctcgcgtcccatt

SEQ ID NO: 1606 - DNA, 225 bp, Unknown
  Encodes 16S rRNA from Howardella
agagtttgatcatggctcaggataaacgctggcggcgcacataagacatgcaagtcgaacggacttaacttctagcttgctagaagagcggttagtggcggactggtgagtaacacgtaagaaatctgcctatcagaggggaataacagtgagaaatcactgctaataccgcatatgccatagttatcgcatgatgacagtgggaaagaagcaattcgctgatag

SEQ ID NO: 1607 - DNA, 225 bp, Unknown
  Encodes 16S rRNA from Pelospora
agagtttgatcatggctcaggatgaacgctggcggcgcgcctaacacatgcaagtcgaacgaaatgagtagcttcggttacgagtttagtggcggacgggtgagtaacgcgtggataatttgcctttcagtgggggatagctgagagaaatctcaattaataccgcataacataatttgttcgcatgagtgagttattaaagatgcaaatcgctggaagagaagt

SEQ ID NO: 1608 - DNA, 225 bp, Unknown
  Encodes 16S rRNA from Clostridium sensu stricto
agagtttgatcatggctcaggacgaacgctggcggcgcgcctaacacatgcaagtcgaacgggactagtgaccggagcttagaggctttctaggttgcgatcactagttcagtggcggacgggtgagtaaagcatgagtaactttcccataagtggggaatagcttttggaaacagaagataataccgcatgaatcgttgaggacacatgttcacaacggaaaag

SEQ ID NO: 1609 - DNA, 225 bp, Unknown
  Encodes 16S rRNA from Selenomonas
agagtttgatcatggctcagattgaacgctggcggcgtgcttaacacatgcaagtcgaacgagacggatagaagcttgcttttagaagtcgagtggcaaacgggtgagtaacgcgtagacaacctgcctctgggatggggacaacagcccgaaagggctgctaataccgaatgaaatggtttcttctcctgaagagatcatgaaagatggcctctaaattatgct

SEQ ID NO: 1610 - DNA, 225 bp, Unknown
  Encodes 16S rRNA from Fibrobacter
agagtttgatcctggctcaggatgaacgctagcgacaggcctaacacatgcaagtcgagcgaggacgtagcaatacgagccgagcggcgaatgggtgagtaacgcgtaagcaatctgccccgcattccggaacaaccgtgccaacgcgcggctaatgccgggagccgtggcggtccacatgggccgttgacgaaagatttatcgatgcgggatgagcttgcgtcc

SEQ ID NO: 1611 - DNA, 225 bp, Unknown
  Encodes 16S rRNA from Clostridium III
agagtttgatcctggctcaggacgaacgctggcggcgtgcctaacacatgcaagtcgaacgagaagtcttgaaatgattccttcgggatgaatggatagatggacagtggcggacgggcgagtaacgcgtgagtaacctgcccataagcgggggatagccgatggaaacgtcgagtaataccccatgacataattgagtcgcatggcttaattatcaaagattta

SEQ ID NO: 1612 - DNA, 225 bp, Unknown
  Encodes 16S rRNA from Sphingomonas
agagtttgatcatggctcagaacgaacgctggcggcatgcctaacacatgcaagtcgaacgagatcttcggatctagtggcgcacgggtgcgtaacgcgtgggaatctgccctttggttcggaataacagttggaaacgactgctaataccggatgatgacgtaagtccaaagatttatcgccagaggatgagcccgcgtaggattagctagttggtgtggtaag

SEQ ID NO: 1613 - DNA, 225 bp, Unknown
  Encodes 16S rRNA from Selenomonas
agagtttgatcatggctcaggacgaacgctggcggcgtgcttaacacatgcaagtcgaacggggcgattgaaagcttgcttttgagagcctagtggcaaacgggtgagtaacgcgtaggcaacctgccttcgggatggggacaacaggacgaaagccctgctaataccgaatgaagcatcctccctgcatggggagggtatgaaagatggcctctgaatatgcta

SEQ ID NO: 1614 - DNA, 225 bp, Unknown
  Encodes 16S rRNA from Eggerthella
agagtttgatcctggctcaggatgaacgctggcggcgtgcctaacacatgcaagtcgaacgatgaaaccgccctcgggcggacatgaagtggcgaacgggtgagtaacacgtgaccaacctgccccgcgctccgggacagcctcgcgaaagcgggattaataccggatgcgccccggcggccgcatggccgccgggggaaagccctaagcggcgcgggatggggt

SEQ ID NO: 1615 - DNA, 225 bp, Unknown
  Encodes 16S rRNA from Treponema
agagtttgatcatggctcagaacgaacgctggcggcgcgtcttaagcatgcaagtcgggcgggattccccagcttgctggggatgagagcggcggactggtgagtaacgcgtgggcgacgcgccccgtggaccgggatagcctgtggaaacacagggtaataccgggcgagctcccccgcgccggaggcgggggaggaaaggagccgaggctccgccacgggagc

SEQ ID NO: 1616 - DNA, 225 bp, Unknown
  Encodes 16S rRNA from Mogibacterium
agagtttgatcatggctcaggatgaacgctggcggcgtgcctaatacatgcaagtcgagcgagaaattaatcagaggcgttttcggacaagtcagattaatggaaagcggcggacgggtgagtaacgcgtaggcaacctgcccttagcagagggatagccattggaaacgatgattaaaacctcataacgccaactcaacacatgttgagctggccaaagattta

SEQ ID NO: 1617 - DNA, 225 bp, Unknown
  Encodes 16S rRNA from Adlercreutzia
agagtttgatcatggctcaggatgaacgctggcggcgtgcctaacacatgcaagtcgaacagttaaaccggcttcggccggaaatagagtggcgaacgggtgagtaacacgtgaccaacctgccccgcgcaccgggatagccccccgaaagggggattaataccggatgcgccgggagggccgcatggccctcccgggaaagcccaggcggcgcgggatggggtc

SEQ ID NO: 1618 - DNA, 225 bp, Unknown
  Encodes 16S rRNA from Selenomonas
agagtttgatcctggctcaggacgaacgctggcggcgtgcttaacacatgcaagtcgaacgagacgattttaagcttgcttagatgagtcgagtggcaaacgggtgagtaacgcgtagacaacctgccgcaaagatggggacaacagtccgaaaggactgctaataccgaatgttgtcagttttccgcatgggagactgattaaagatggcctctacttgtaagc

SEQ ID NO: 1619 - DNA, 225 bp, Unknown
  Encodes 16S rRNA from Methylomicrobium
agagtttgatcctggctcagattgaacgctggcggcgtgcttaacacatgcaagtcgagcggtagcaggcgtagcaatacgtgctgacgagcggcgaacgggtgagtaatgcttaggaatcttcctcgtagtggggaataacttggggaaactcaagctaataccgcatacgaactacggttgaaagcgggggatcgcaagacctcgcgctatgagatgagccta

SEQ ID NO: 1620 - DNA, 225 bp, Unknown
  Encodes 16S rRNA from Leuconostoc
agagtttgatcctggctcaggatgaacgctggcggcgtgcctaatacatgcaagtcgaacgcacagcgaaaggtgcttgcacctttcaagtgagtggcgaacgggtgagtaacacgtggacaacctgcctcaaggctggggataacatttggaaacagatgctaataccgaatgaaacttagtgtcgcatgacacaaagttaaaaggcgctttggcgtcacctag

SEQ ID NO: 1621 - DNA, 225 bp, Unknown
  Encodes 16S rRNA from Pyramidobacter
agagtttgatcatggctcagattgaacgctggcggcgtgcttaacacatgcaagttgtgcggcgagttttcgaagaagacttcggttggaattggaaatgagcagcagcggacgggtgagtaaagcacaaggacgtgtcctgcagagggggacaactacgggaaaccgcagctaataccccatacgccgagaggtgaaagcagcaatgcgctggaggagcggctt

SEQ ID NO: 1622 - DNA, 225 bp, Unknown
  Encodes 16S rRNA from Butyrivibrio
agagtttgatcctggctcaggatgaacgctggcggcgtgcctaacacatgcaagtcgaacggtgctttgcggtgatgaagcttcggcagattcttgtaaagcatagtggcggacgggtgagtaacgcgtgggcaacctgcctctcagtgggggatagcagctggaaacggctggtaataccgcatatgcgcacggttccgcatggaacagtgtgaaaagatatat

SEQ ID NO: 1623 - DNA, 225 bp, Unknown
  Encodes 16S rRNA from Bacteroides
agagtttgatcctggctcaggatgaacgctagctacaggcttaacacatgcaagtcgaggggcagcgggaggtcagcttgctgacttcgccggcgaccggcgcacgggtgagtaacacgtatccaacctgccgcgcactccgggacagccctctgaaaggaggattaataccggatggtgtcatggagggacatcccttcgtgactaaagattcatcggtgcgcc

SEQ ID NO: 1624 - DNA, 225 bp, Unknown
  Encodes 16S rRNA from Butyricimonas
agagtttgatcatggctcaggatgaacgctagcggcaggcttaacacatgcaagtcgaggggcagcgcgggagtagcaatacacctggcggcgaccggcggaagggtgcgtaacgcgtgagcaacatacccgtcactgggggataacagttggaaacgactcctaataccccataatacaagaggtgacatcatcttttgttgaaagttacggcggtgacggatt

SEQ ID NO: 1625 - DNA, 225 bp, Unknown
  Encodes 16S rRNA from Ruminococcus
agagtttgatcatggctcaggacgaacgctggcggcacgcctaacacatgcaagtcgaacggtgaatacttagcttgctttgtattcatagtggcggacgggtgagtaacacgtgagcaacctgcctctgagagagggatagcttctggaaacggatggtaatacctcatgatatagcgttctcgcatgggaatgttatcaaatgaatttcgctcagagatgggc

SEQ ID NO: 1626 - DNA, 225 bp, Unknown
  Encodes 16S rRNA from Clostridium sensu stricto
agagtttgatcctggctcaggacgaacgctggcggcgcgcctaacacatgcaagtcgaacgggactagtgaccggagcttagaggtaatttgtctaggttgcgatcactagttcagtggcggacgggtgagtaaagcatgagtaactttcccataagtggggaatagcttttggaaacagaagataataccgcataaatcgttgagggcacatgctcacaacgga

SEQ ID NO: 1627 - DNA, 225 bp, Unknown
  Encodes 16S rRNA from Butyrivibrio
agagtttgatcctggctcaggatgaacgctggcggcgtgcctaacacatgcaagtcgaacggggttatctcgccgttgaagcttcggcagagacatgaggtaacttagtggcggacgggtgagtaacgcgtgggcaacctgccccgtaccgggggatagcagttggaaacgactgataataccgcataagcgcacggtgtggcatcacacagtgtgaaaaactcc

SEQ ID NO: 1628 - DNA, 225 bp, Unknown
  Encodes 16S rRNA from Corynebacterium
agagtttgatcatggctcaggatgaacgctggcggcgtgcttaacacatgcaagtcgaacggaaaggcctcagcttgctggggtactcgagtggcgaacgggtgagtaacacgtgggtgatctgccctgcactttgggataagcccgggaaactgggtctaataccgaatatgaccacttcttggatgttgtggtggaaagcttttgcggtgtgggatgagcctg

SEQ ID NO: 1629 - DNA, 225 bp, Unknown
  Encodes 16S rRNA from Proteiniborus
agagtttgatcctggctcaggatgaacgctggcggcgtgcttaacacatgcaagtcgagcgagaactcgctcagccgattcttcggaagaaagcagagcgacggaaagcggcggacgggtgagtaacgcgtgggaaacctgccctgtgcagggggacagccgagggaaacttcgattaataccccataacaccaaagcatcgcatggtgcaatggtcaaagattt

SEQ ID NO: 1630 - DNA, 225 bp, Unknown
  Encodes 16S rRNA from Spirochaeta
agagtttgatcctggctcagaacgaacgctggcggcgcgtcttaagcatgcaagtcgagcgggaagaagtagcttgctacttctgagagcggcggactggtgagtaacgcgtgggtgacgcacccctgtgtcggggacagcccgtggaaacacggagtgataccggatacggtcccatggatcagaaacatgggaggaaaggagctacggcttcgcacggggagc

SEQ ID NO: 1631 - DNA, 225 bp, Unknown
  Encodes 16S rRNA from Acetitomaculum
agagtttgatcctggctcaggatgaacgctggcggcgtgcctaacacatgcaagtcgaacggggtatagacgctgaagaggtttcgactgattcttgtttatacttagtggcggacgggtgagtaacgcgtgggcaacctgccctgtactgggggatagcagctggaaacggctggtaataccgcataagcgcacgataccgcatggtatagtgtgaaaagctcc

SEQ ID NO: 1632 - DNA, 225 bp, Unknown
  Encodes 16S rRNA from Selenomonas
agagtttgatcctggctcaggacgaacgctggcggcgtgcttaacacatgcaagtcgaacggggcgattagaagcttgcttttatgagcctagtggcaaacgggtgagtaacgcgtaggcaacctgcctttgggatggggacaacaggacgaaagccctgctaataccgaatgaagtagtctttccgcatggagggactatgaaagatggcctctacatgtaagc

SEQ ID NO: 1633 - DNA, 225 bp, Unknown
  Encodes 16S rRNA from Altererythrobacter
agagtttgatcctggctcagaacgaacgctggcggcatgcttaacacatgcaagtcgaacggtaatgtatagtacttgtattatatattatagtggcaaacgggtgagtaacgcgtggggacgtacccttcagtaatgaataacggatggaaacgtacgctaatacattataggattgagagatgaaagagagatcgctgagggagcggcccgcgttagattagg

SEQ ID NO: 1634 - DNA, 225 bp, Unknown
  Encodes 16S rRNA from Atopobium
agagtttgatcatggctcaggatgaacgctggcggcgcgcctaacacatgcaagtcgaacggttaagaccccttcgggggtgaataaagtggcgaacggctgagtaacacgtgggcaacctacctcttgctctgggatagcctcgggaaaccgtgggtaataccggatactctgtaactgtcgcatggcggatacaggaaagcgcatacggcaagagatgggccc

SEQ ID NO: 1635 - DNA, 225 bp, Unknown
  Encodes 16S rRNA from Clostridium IV
agagtttgatcctggctcaggacgaacgctggcggcgtgcctaacacatgcaagtcgaacggacttagttggatgcttgcatccggcgacagttagtggcggacgggtgagtaacgcgtgaataacctgcccaacagagggggataacgtttggaaacgaacgctaataccgcataacattatggtaccgcatggtattataatcaaaggagcaatccgctgatg

SEQ ID NO: 1636 - DNA, 225 bp, Unknown
  Encodes 16S rRNA from Clostridium XlVa
agagtttgatcatggctcaggatgaacgctggcggcgtgcctaacacatgcaagtcgagcggaccttagagagtgaacagcttgctgggatctttcgaaaggttagcggcggacgggtgagtaacgcgtgggtaacctgcctcatacagggggatagcagttggaaacgactggtaataccgcataagcgcacagtaccgcatggtatagtgtgaaaaactccgg

SEQ ID NO: 1637 - DNA, 225 bp, Unknown
  Encodes 16S rRNA from Clostridium XlVa
agagtttgatcatggctcaggatgaacgctggcggcgtgcctaacacatgcaagtcgaacgggaacctcatagtggagacttcggtcaaagcagtgagaattctagtggcggacgggtgagtaacgcgtggataacctgcctttaagaattggataacagtgagaaatcattgctaatacaatataagcttacagtctcgcatgagacagtgagaaaagatttat

SEQ ID NO: 1638 - DNA, 225 bp, Unknown
  Encodes 16S rRNA from Clostridium IV
agagtttgatcatggctcaggatgaacgctggcggcgtgcataacacattcaagtcgaacgggactaaaccgattaatccttcgggaagcgttgatttagtttagtggcggacgggtgagtaacgcgtgagcaacctgccttgaagagggggataacacagggaaacttgtgctaataccgcataacatatgacgatcgcatggtcgacatatcaaagctccgac

SEQ ID NO: 1639 - DNA, 225 bp, Unknown
  Encodes 16S rRNA from Clostridium III
agagtttgatcctggctcaggacgaacgctggcggcgtgcctaacacatgcaagtcgaacgagaagtcttgaaatgatcccttcggggtgaatggatagatggacagtggcggacgggcgagtaacgcgtgagtaacctgcccataagagagggatagccgatggaaacgtcgagtaatacctcatattgtagttaattcgcatggattgattatgaaagattta

SEQ ID NO: 1640 - DNA, 225 bp, Unknown
  Encodes 16S rRNA from unknown taxa
agagtttgatcatggctcaggatgaatgctggcggcgtgcctaatacatgcaagtcgagcggtaacagggggactcaccgtgctcttgacactcttgcctatgaggaagaggtcggatcgagagtacagtgagtccctgctgacgagcggcggacggctgagtaacgcgtgggaacataccccaaactgagggataactagtcgaaagattagctaataccgcat

SEQ ID NO: 1641 - DNA, 225 bp, Unknown
  Encodes 16S rRNA from Desulfotomaculum
agagtttgatcatggctcaggacgaacgctggcggcgtgcttaatacatgcaagtcgaacggagatattccgccgttcaaggtttcggctgagaacatgggatatcttagtggcgaacgggtgagtaacgcgtgaacaacctgactcaaagagggggataacaacgggaaactgttgctaataccgcataagaccacagtgtcgcatggcacaggggtcaaagat

SEQ ID NO: 1642 - DNA, 225 bp, Unknown
  Encodes 16S rRNA from Pedobacter
agagtttgatcctggctcaggatgaacgctagcggcaggcctaatacatgcaagtcggacggtaagtgccccttcgggggcacgagagtggcggacgggtgcgtaacgcgtatgcaaccaacccccgtcatccggatagccggtggaaacgccggataatacggaatgaacccttcggtgggcatccaccggagggcaaggcggcgacgcggacggggacgggca

SEQ ID NO: 1643 - DNA, 162 bp, Unknown
  Encodes 16S rRNA from Bacteroides
agagtttgatcatggctcaggatgaacgctagctacaggcttaacacatgcaagtcgaggggcagcatgaactcgagaaagggtgctgttcaaatagggcagtattcagatgttagaaaaagaataagtaccggcaaactccgtgccagcagccgcggtaat

SEQ ID NO: 1644 - DNA, 225 bp, Unknown
  Encodes 16S rRNA from Asaccharobacter
agagtttgatcatggctcaggatgaacgctggcggcgtgcttaacacatgcaagtcgaacgggaaagcgccctcgggcgcgagtacagtggcgaacgggtgagtaacacgtgaccaacctgccccccgcaccgggatagccgggcgaaagcccgggtaataccggatgaccccgcaccgcggcatcgcggcgcgggcaaagcccagacggcgggggatggggtcg

SEQ ID NO: 1645 - DNA, 225 bp, Unknown
  Encodes 16S rRNA from Microbacterium
agagtttgatcatggctcaggacgaacgctggcggcgtgcttaacacatgcaagtcgaacggtgaaggcggagcttgctctgctggatcagtggcgaacgggtgagtaacacgtgagcaatctgccccgaactctgggataagcgctggaaacggcgtctaataccggatacgacacgggagggcatcctctccgtgtggaaagatttttcggttcgggatgagc

SEQ ID NO: 1646 - DNA, 225 bp, Unknown
  Encodes 16S rRNA from Treponema
agagtttgatcatggctcagaacgaacgccggcggcgcgtcttaagcatgcaagtcgggcgggatcagggtgcttgcaccctgtgagagcggcggactggcgaggaacgcgtgggcgacgtgccctccgcaccgggacagccggcagaaatgccgggtgatacgggatgagctcgtgcgatgtggtgttgtacgaggaaagctgccacggcagcggcggaggagc

SEQ ID NO: 1647 - DNA, 225 bp, Unknown
  Encodes 16S rRNA from Dethiosulfovibrio
agagtttgatcatggctcaggatgaacgctggcggcgtgcataacacattcaagtcgaacgaagcactttggcggaagccttcgggtggaagctgatttgacttagtggcggacgggtgagtaacgcgtgagcaacctgcctggctgtgagggataacacagggaaacttgtgctaataccacatgacgcatggagatcgcatgttttccatgccaaagatatat

SEQ ID NO: 1648 - DNA, 225 bp, Unknown
  Encodes 16S rRNA from Oscillibacter
agagtttgatcatggctcaggacgaacgctggcggcgtgcctaacacatgcaagtcgaacgaagctctttgaagggcggcttcggccaaacggatgagatgacttagtggcgaacgggtgagtaacgcgtgaggaacctgcctttcagtgggggacaacagttggaaacgactgctaataccgcataacgtacagaggtcgcatgaccattgtaccaaagattta

SEQ ID NO: 1649 - DNA, 225 bp, Unknown
  Encodes 16S rRNA from Selenomonas
agagtttgatcatggctcaggacgaacgctggcggcgtgcttaacacatgcaagtcgaacgagggaattagaagcttgcttttatgacccgagtggcaaacgggtgagtaacgcgtagacaacctgcctctcagatggggacaacagcccgaaagggctgctaataccgaatgttgtatttcttccgcatggaggagatattaaagatggcctctacttgtaagc

SEQ ID NO: 1650 - DNA, 225 bp, Unknown
  Encodes 16S rRNA from Eubacterium
agagtttgatcctggctcaggacgaacgctggcggcgtgcttaacacatgcaagtcgaacgaagcttgacgaatgattccttcgggatgatttctgatatgactgagtggcggacgggtgagtaacgcgtgagtaacctgcctcttggagggggatagtgtttggaaacgaacagtaataccgcataacgtgtacggatggcatcttctgtataccaaagattta

SEQ ID NO: 1651 - DNA, 225 bp, Unknown
  Encodes 16S rRNA from Ruminococcus
agagtttgatcctggctcaggacgaacgctggcggcacgcttaacacatgcaagtcgaacggagatattcccttcgggggataacttagtggcggacgggtgagtaacacgtgagcaacctgccttacagagaggaataatgactggaaacggtcactaatacctcataaaatatttgaatcgcatggtttggatatcaaagaataatcgctgtaagatgggctc

SEQ ID NO: 1652 - DNA, 225 bp, Unknown; identical to SEQ ID NO: 265
  Encodes 16S rRNA from Treponema

SEQ ID NO: 1653 - DNA, 225 bp, Unknown
  Encodes 16S rRNA from Spirochaeta
agagtttgatcatggctcagaacgaacgctggcggcgcgtcttaagcatgcaagtcgagcggcaagacagtgcttgcactgtcctagagcggcggactggtgagtaacacgtgggttacgtaccctccggacggggatagcctgtggaaacacagggtaataccggatacggcggcacagcatggagttgtgtcgggaaaggagcttcggctccgccggaggatc

SEQ ID NO: 1654 - DNA, 225 bp, Unknown
  Encodes 16S rRNA from Roseburia
agagtttgatcatggctcaggatgaacgctggcggcgtgcctaacacatgcaagtcgagcggacctgattaagtgattagcttgctaagaacttatgactggttagcggcggacgggtgagtaacgcgtgggtaacctgcctcatacagggggatagcagttggaaacgactggtaataccgcataagcgcacggtaccgcatggtacagtgtgaaaaactccgg

SEQ ID NO: 1655 - DNA, 225 bp, Unknown
  Encodes 16S rRNA from Ruminococcus
agagtttgatcatggctcaggacgaacgctggcggcgcgcctaacacatgcaagtcgaacggggcacgatttagatttcttcggaatgatagattattgcttagtggcggacgggtgagtaatacgtgagtaatctgccttatagatggggataacgatcagaaatggtcgctaataccctataatgtatgttttccgcatggttagcataccaaagggattcgc

SEQ ID NO: 1656 - DNA, 225 bp, Unknown
  Encodes 16S rRNA from Butyricimonas
agagtttgatcctggctcaggatgaacgctagcggcaggcttaacacatgcaagtcgaggggcagcgcgattgtagcaatacgattggcggcgaccggcgcaagggtgcgtaacgcgtgagcaacatacccgcaacagggggataagcgatggaaacgtcgtctaataccccatggagaccaagggcggcatcgtccatggcctaaacccacgggggttgcggat

SEQ ID NO: 1657 - DNA, 225 bp, Unknown
  Encodes 16S rRNA from Pedobacter
agagtttgatcatggctcaggatgaacgctagcggcaggcctaatacatgcaagtcgaacgggagggggcccttcggggcctccgagagtggcgcacgggtgcgtaacgcgtatgcaaccaaccccgcactgggggacagccggtggaaacgccgggtaataccccatgccgacgggaggggacatccccatccgttgaaaggcttcggtcggtgcgggacgggc

SEQ ID NO: 1658 - DNA, 225 bp, Unknown
  Encodes 16S rRNA from Spirochaeta
agagtttgatcctggctcagaacgaacgctggcggcgcgtcttaagcatgcaagtcgaacggcaagatggagcttgctccatcctagagtggcggactggtgagtaacacgtgggtgacatgcctttcagttggggatagctactagaaatagtagataataccgaatacggtggcatatcttggaagtatgccaagaaaggagctaaggctccgctgagagatt

SEQ ID NO: 1659 - DNA, 225 bp, Unknown
  Encodes 16S rRNA from Parabacteroides
agagtttgatcctggctcaggatgaacgctagcgacaggcttaacacatgcaagtcgaggggcagcggggaggtagcaatacttccgccggcgaccggcgcactggtgagtaacacgtatgcaacctgcccccggttggggaataacccgcggaaacgcggactaatgccccgtatgcatggccgccgcatgacggccatgtgatagaacttcgtccggggatgg

SEQ ID NO: 1660 - DNA, 225 bp, Unknown
  Encodes 16S rRNA from Methylococcus
agagtttgatcatggctcagattgaacgctggcggcatgcctaacacatgcaagtcgaacgggagtaaggggcaactcttactctagtggcggacgggtgaggaatacgtaggaatctaccttagagtgggggataactcggggaaactcgagctaataccgcatatgttctacggagtaaagggggcgcaagctctcgctttaagatgagcctacgtcggatta

SEQ ID NO: 1661 - DNA, 225 bp, Unknown
  Encodes 16S rRNA from Enterorhabdus
agagtttgatcatggctcaggatgaacgctggcggcgtgcctaacacatgcaagtcgaacggtgaaaccgcctccgggcggacatgaagtggcgaacgggtgagtaacacgtgaccaacctgccccgcgcaccgggacagccccccgaaagggggattaataccggatactccggccgggccgcatggcccggccgggaaagctccggcggcgcgggatggggtc

SEQ ID NO: 1662 - DNA, 225 bp, Unknown
  Encodes 16S rRNA from Clostridium sensu stricto
agagtttgatcctggctcaggacgaacgctggcggcgtgcttaatacatgcaagtcgaacggatatgtagcaatacatattagtggcggacgggtgagtaacgcgtaatcaacctgccctttacaggggaataacacttggaaacaggtgctaataccgcatatgaccacaacacggcatcgtgaaggggtaaaagttttatcggtaaaggagggggttgcgtat

SEQ ID NO: 1663 - DNA, 225 bp, Unknown
  Encodes 16S rRNA from Gelidibacter
agagtttgatcctggctcaggataaacgctagcggcaggcctaacacatgcaagtcgagcggcagcgggatgtagcaatacattgccggcgagcggcggacgggtgagtaacgcgtatgcaacctgcccaccacacggagatagccgaccgaaaggacgattaaactccgatggcattgggacccggcatcgggatccaattaaatattcataggtggtggatgg

SEQ ID NO: 1664 - DNA, 225 bp, Unknown
  Encodes 16S rRNA from Sporobacter
agagtttgatcatggctcaggatgaacgctggcggcgtgcctaacacatgcaagtcgaacgaagcacaatggaaggagacttcggtcaacggaagttgtgacttagtggcggacgggtgagtaacgcgtgagcaacctgcctcagagtgggggacaacagctggaaacggctgctaataccgcataatactttcggaaggcatcttctgaaagtcaaagctttat

SEQ ID NO: 1665 - DNA, 225 bp, Unknown
  Encodes 16S rRNA from Pedobacter
agagtttgatcctggctcaggatgaacgctagcggcaggcctaatacatgcaagtcgtacggtaagcggtccttcgggactgcgagagtggcggacgggtgcgtaacgcgtatgcaaccaacccccctcgccgggatagccggtggaaacgccggataataccggatgcgccgcgtgggaggcatctcccgagcggcaaggcggagacgcggagggggacgggca

SEQ ID NO: 1666 - DNA, 225 bp, Unknown
  Encodes 16S rRNA from unknown taxa
agagtttgatcctggctcaggatgaacgctagctacaggcttaacacatgcaagtcgaacgagaaatacacttcggtgtatggaaagtggcggacgggtgagtaatgtgtagagaatctgccctgaagagggggacaacagagggaaacttctgctaataccccatatgcgcgtagttgagatactattcgtgaaagatttatcgcttcaggatgagtctgcatc

SEQ ID NO: 1667 - DNA, 225 bp, Unknown
  Encodes 16S rRNA from Syntrophococcus
agagtttgatcatggctcaggatgaacgctggcggcgtgcttaacacatgcaagtcgaacggacttgcccaccgaagcggaaggtgcttgcattcgaagcttcaccgggcaggttagtggcggacgggtgagtaacgcgtggggaacctgccccgtaccgggggataacagttagaaatgactgctaataccgcataagcgcacactgaggcatctcagagtgtg

SEQ ID NO: 1668 - DNA, 225 bp, Unknown
  Encodes 16S rRNA from Slackia
agagtttgatcctggctcaggatgaacgccggcggcgcgcctaacacatgcaagtcgagcggaggacccgccctcgggcgggcgatcagcggcgaacgggtgagtaacgcgtgggcaacctgccccccgcacgggaatagccccgggaaaccgggggtaatgcccgacggcccggcagaggggcatccctctgccggcgaagccatcgcggcgggggatgggccc

SEQ ID NO: 1669 - DNA, 225 bp, Unknown
  Encodes 16S rRNA from Mogibacterium
agagtttgatcctggctcaggatgaacgctggcggcgtgcctaacacatgcaagtcgagcgagaaatctatgtgatgaaacttcggtcgaatcttttagatggaaagcggcggacgggtgagtaacgcgtaggcaacctgcccttagcagggggatagccattggaaacgatgattaaaaccccataatacggatttatcacatgttgaatccgtcaaagattta

SEQ ID NO: 1670 - DNA, 225 bp, Unknown
  Encodes 16S rRNA from Prevotella
agagtttgatcatggctcaggatgaacgctagctacaggcttaacacatgcaagtcgaggggcagcacgtgggtagcaataccctgggtggcgaccggcgcacgggtgagtaacgcgtatccaacctggcccatagtagggaacagcccggcgaaagtcggattaatgccctatgttttcctcagtgagcattttatgaggaacaaagacttgtcgctatgggat

SEQ ID NO: 1671 - DNA, 225 bp, Unknown
  Encodes 16S rRNA from Pseudoflavonifractor
agagtttgatcatggctcaggacgaacgctggcggcgtgcttaacacatgcaagtcgagcggagatgaattgaatgagagcttcggcaggatttcgattgatcttagcggcggacgggtgagtaacgcgtgaacaatctgtcccacacagggggataacacttcgaaagaagtgctaataccgcataagaccacggtgccgcatggcacaggggtaaaagaaatt

SEQ ID NO: 1672 - DNA, 225 bp, Unknown
  Encodes 16S rRNA from Veillonella
agagtttgatcctggctcaggatgaacgctggcggcgtgcttaatacatgcaagtcgaacggatgattcggtctagcttgctagatcggagagtcagtggcgaacgggtgagtaatacgtaggcaacctgccccaaagcgggggatagcagttggaaacgactattaataccgcataggtaatctcgaggcatcttgagattattaaaggtgcgtttgcaccgct

SEQ ID NO: 1673 - DNA, 225 bp, Unknown
  Encodes 16S rRNA from Clostridium XlVa
agagtttgatcctggctcaggatgaacgctggcggcgtgcttaacacatgcaagtcgaacgaagcacttttccttgattcttcggatgaaaaggaaatttgactgagtggcggacgggtgagtaacgcgtgggtaacctgccctgtacagggggataacagttagaaatgactgctaataccgcataagaccacagcatcgcatggtgcaggggtaaaaactccg

SEQ ID NO: 1674 - DNA, 225 bp, Unknown
  Encodes 16S rRNA from Bacillus
agagtttgatcatggctcaggatgaacgctggcggcgtgcctaatacatgcaagtcgagcgaatggattaagagcttgctcttatgaagttagcggcggacgggtgagtaacacgtgggtaacctgcccataagactgggataactccgggaaaccggggctaataccggataacattttgaaccgcatggttcgaaattgaaaggcggcttcggctgtcactta

SEQ ID NO: 1675 - DNA, 225 bp, Unknown
  Encodes 16S rRNA from Pedobacter
agagtttgatcatggctcaggatgaacgctagcggcaggcctaatacatgcaagtcgaacggtaaacgccccttcgggggcgtgagagtggcggacgggtgcgtaacgcgtatgcaaccaacccccctcaccgggatagccggtggaaacgccggataagaccggatgcgccgctggggaggcatctccccggcggcaaggcggcgacgcggagggggacgggca

SEQ ID NO: 1676 - DNA, 225 bp, Unknown
  Encodes 16S rRNA from Clostridium IV
agagtttgatcatggctcaggatgaacgctggcggcgtgcctaacacattcaagtcgaacggagaagggagcttcggttcccggatcagtggcggacgggtgagtaacgcgtgagcaacctgccttcgtgtggggaataacacagggaaacttgtgctaataccgcataatgcaaagacgcagcattacgtttttgccaaagatttatcgcatgaagatgggctc

SEQ ID NO: 1677 - DNA, 225 bp, Unknown
  Encodes 16S rRNA from Fibrobacter
agagtttgatcatggctcagaacgaacgctggcggcgtgccttatacatgcaagtcgagcgagggcgcagcaatgcgaaccgagcggcgaacgggtgagtaacgcgtgaacaacctgccccaaagtccgggatagcccttccaacggaggattaataccggatggcgagggtttccgcatggagacctatccaaagtcttggcgctatgggaggggttcgcgtcc

SEQ ID NO: 1678 - DNA, 225 bp, Unknown
  Encodes 16S rRNA from Paenibacillus
agagtttgatcatggctcaggattaacgctggcaccatgcctaatacatgcatgtcgagcggagtttagagagcttgctttctaaacttagcggcaaatgggtgagtaacacgtaaggaacctgcctaagtgacgaggacaacggttggaaacgactgctaatactggatagtataagaaaccgcatgatttcttatttaaaggtccgtttggaccacgcttaga

SEQ ID NO: 1679 - DNA, 225 bp, Unknown
  Encodes 16S rRNA from Brevundimonas
agagtttgatcatggctcaggacgaacgctggcggtgtgcctcatacatgcaagtcgaacgataaggttccttcgggaatacataagtggcggacgggtgagtacaacataggaaatctgccctaaactgggggacaacagagggaaacttctgctaataccccatacgagataagttgaaatatttatcttgaaagctccggcggtttaggatgagcctgtgcc

SEQ ID NO: 1680 - DNA, 225 bp, Unknown
  Encodes 16S rRNA from Desulfovibrio
agagtttgatcctggctcagattgaacgctggcggcgtgcttaacacatgcaagtcgaacgcgaaaggggcttcggccccaagtagagtggcgcacgggtgagtaacgcgtggataatctgcccctgcaactggaatagcgactggaaacggtcgataataccggatacgcccttgttgtacaacgaggggaaaggagacctctgcttgcaagtttccgtgcagg

SEQ ID NO: 1681 - DNA, 225 bp, Unknown
  Encodes 16S rRNA from Clostridium XI
agagtttgatcctggctcaggacgaacgctggcggcgtgcctaacacatgcaagtcgagcggagacataaggaacggaggcttcggccgaagggagctatgttttagcggcggacgggtgagtaacgcgtgaacgatctgtcccttacagggggataacacatggaaacaggtgctaataccgcataagaccacagagctgcatggctcaggggtcaaaggagga

SEQ ID NO: 1682 - DNA, 225 bp, Unknown
  Encodes 16S rRNA from Helicobacter
agagtttgatcatggctcagagtgaacgctggcggcgtgcctaatacatgcaagtcgaacgatgaagcttttagcttgctagaagtggattagtggcgcacgggtgagtaatgcataggttatgtgccctttagtctgggatagccactggaaacggtgattaatactagatactccctacgggggaaagtttttcgctaaaggatcagcctatgtcctatcagc

SEQ ID NO: 1683 - DNA, 225 bp, Unknown
  Encodes 16S rRNA from Prevotella
agagtttgatcatggctcaggatgaacgctagctacaggcttaacacatgcaagtcgaggggcagcacgtgggtagcaataccctgggtggcgaccggcgcacgggtgagtaacgcgtatccaacctggcccatagtagggaacagcccggcgaaagtcggattaatgccctatgttttcctcagggagcattttatgaggaacaaagacttgtcgctatgggat

SEQ ID NO: 1684 - DNA, 225 bp, Unknown
  Encodes 16S rRNA from Clostridium XlVa
agagtttgatcctggctcaggatgaacgctggcggcgtgcctaacacatgcaagtcgaacggtgaaagaagactgaagccttcgggcggaagttttttggatcagtggcggacgggtgagtaacgcgtggataacctgcctcatacagggggataacagggagaaatcactgctaataccgcataagcgcacaggaccgcatggtctggtgtgaaaaacttcggt

SEQ ID NO: 1685 - DNA, 225 bp, Unknown
  Encodes 16S rRNA from Prevotella
agagtttgatcctggctcaggatgaacgctagcggcaggcttaacacatgcaagtcgaggggcagcgggttgtagcaatacaatgccggcgaccggcgtaagggtgagtaacgcgtgagcgacgtgcccgtcacagggggacaagcgctggaaacggcgtctgataccccataggaatgctccctgcatggggggtgtttgaaagatttatcggtgacggatcgg

SEQ ID NO: 1686 - DNA, 225 bp, Unknown
  Encodes 16S rRNA from Herbiconiux
agagtttgatcctggctcaggatgaacgctggcggcgtgcttaacacatgcaagtcgaacggtgaaagcgggagcttgctcctgctggatcagtggcgaacgggtgagtaacacgtgagtaacctgcccttgactctgggataagcgttggaaacgacgtctaataccggatacgaccttcggaggcatctcctggaggtggaaagaatttcggtcaaggatgga

SEQ ID NO: 1687 - DNA, 225 bp, Unknown
  Encodes 16S rRNA from Clostridium IV
agagtttgatcatggctcaggacgaacgctggcggcgtgcctaacacattcaagtcgaacggtgaaggaagcttgcttccggatcagtggcggacgggtgagtaacgcgtgagcaacctgccctgcattgggggataacacagggaaacttgtgctaatacctcatgacacatacttaccgcatgataggtatgtcaaagagcaatcgatgcaggatgggctcgc

SEQ ID NO: 1688 - DNA, 225 bp, Unknown
  Encodes 16S rRNA from Rikenella
agagtttgatcatggctcaggatgaacgctagcggcaggcttaacacatgcaagtcgaggggcagcgcgtggtagcaataccatggcggcgaccggcgcacgggtgcgtaacgcgtatgcaacctgcctgtaacagggggataacccggagaaatttggactaataccgcatattgccgagctgcagcattgcaattcggcgaaaggagcgatccggttacagat

SEQ ID NO: 1689 - DNA, 225 bp, Unknown
  Encodes 16S rRNA from Clostridium XlVa
agagtttgatcatggctcaggatgaacgctggcggcgtgcctaacacatgcaagtcgaacggggtacagacgctgcgagaggaagtgcttgcacggaatcaaacttgtttgtacttagtggcggacgggtgagtaacgcgtggaaaacctgcctcatacagggggataacaggaagaaattcctgctaataccgcatgagcgcacattaccgcatggtagagtgt

SEQ ID NO: 1690 - DNA, 225 bp, Unknown
  Encodes 16S rRNA from Hippea
agagtttgatcctggctcagagttaacgctggcggcgtgcctaacacatgcaagtcgagcgaattcttacagagcatcgtaagagttagcggcaaacgggtgagtaacacatgggaaacctcccttagaatggggaatatctccgtgaaaacggagctaataccgcataagaccacagtttggcatcaaacaggggtaaaagcagcaatgcgttctaagatggtc

SEQ ID NO: 1691 - DNA, 225 bp, Unknown
  Encodes 16S rRNA from Lactobacillus
agagtttgatcctggctcaggacgaacgctggcggcatgcctaatacatgcaagtcgaacgaaccaaactgaagattgatgcttgcatcatgattcagaccttggtgagtggcggacgggtgagtaacacgtgggtaacctgcccaaaagtgggggataacatttggaaacaagtgctaataccgcataacaactactttcacatgatcgtagcttgaaagatgg

SEQ ID NO: 1692 - DNA, 225 bp, Unknown
  Encodes 16S rRNA from Eubacterium
agagtttgatcatggctcaggacgaacgctggcggcgtgcttaacacatgcaagtcgaacgaagcttgattttagatttcttcggaatgataaatgatatgactgagtggcggacgggtgagtaacgcgtgagcaacctgcccttcggagggggatagcgtttggaaacgaacggtaataccgcataatgttaacggaaggcatcttctgttaaccaaaactccg

SEQ ID NO: 1693 - DNA, 225 bp, Unknown
  Encodes 16S rRNA from Clostridium IV
agagtttgatcatggctcaggacgaacgctggcggcgtgcctaacacatgcaagtcgaacggggctgaagatggcacaggctcacctggggagtcaggtgggcgcgtgtcgtcttcagcttagtggcggacgggtgagtaacgcgtgagcgacctgacccatacagggggacaacagctggaaacggctgctaataccgcataagaccacgtacctgagggtatg

SEQ ID NO: 1694 - DNA, 225 bp, Unknown
  Encodes 16S rRNA from Clostridium III
agagtttgatcctggctcaggacgaacgctggcggcgtgcctaacacatgcaagtcgaacgagaaatatggaaatgattccttcggggagaatggaaatatggacagtggcggacgggcgagtaacgcgtgagtaacctgcccataagcgggggatagccgatggaaacgtcgagtaataccccatgacataattgagtcgcatggcttaattatcaaagattta

SEQ ID NO: 1695 - DNA, 225 bp, Unknown
  Encodes 16S rRNA from Lactobacillus
agagtttgatcatggctcaggacgaacgctggcggcatgcctaatacatgcaagtcgaacgaaccatcctgaagattgaagcttgcttcatgattcagatcttggtgagtggcggacgggtgagtaacacgtgggtaacctgcccaaaagtgggggataacatttggaaacaagtgctaataccgcataacaactactttcgcatgatcgtagtttaaaagatgg

SEQ ID NO: 1696 - DNA, 225 bp, Unknown
  Encodes 16S rRNA from Lactobacillus
agagtttgatcatggctcaggacgaacgctggcggcgtgcctaatacatgcaagtcgagcgagcagaaccagcagatttacttcggtaatgacgctggggacgcgagcggcggatgggtgagtaacacgtggggaacctgccccatagtctgggataccacttggaaacaggtgctaataccggataagaaagcagatcgcatgatcagcttataaaaggcggcg

SEQ ID NO: 1697 - DNA, 225 bp, Unknown
  Encodes 16S rRNA from Desulfotomaculum
agagtttgatcctggctcaggacgaacgctggcggcgtgcttaatacatgcaagtcgaacggagatattccgccgttcaaggtttcggctgagaacatgggatatcttagtggcgaacgggtgagtaacgcgtgaacaacctgactcaaagagggggataacaacgggaaactgttgctaataccgcataagaccacgccctcgcatgggggaggggtaaaagat

SEQ ID NO: 1698 - DNA, 225 bp, Unknown
  Encodes 16S rRNA from Prevotella
agagtttgatcatggatggggatgcgtaggattaggcagtcggcggggtaacggcccaccgagccgacgatccttaggggttctgagaggaaggtcccccacactggtactgagacacggaccagactcctacgggaggcagcagtgaggaatattggtcaatggtcggaagactgaaccagccaagtagcgtgcaggatgacggccctacgggttgtaaactgc

SEQ ID NO: 1699 - DNA, 225 bp, Unknown
  Encodes 16S rRNA from Staphylococcus
agagtttgatcatggctcaggatgaacgctggcggcgtgcctaatacatgcaagtcgagcgaacagacgaggagcttgctcctttgacgttagcggcggacgggtgagtaacacgtgggtaacctacctataagactgggataacttcgggaaaccggagctaataccggataatatttcgaaccgcatggttcgatagtgaaagatggctctgctatcacttat

SEQ ID NO: 1700 - DNA, 225 bp, Unknown
  Encodes 16S rRNA from Tenacibaculum
agagtttgatcctggctcaggatgaacgctagcggcaggcttaacacatgcaagtcgaggggtaacaggcggtagcaatactgtgctgacgaccggcgcacgggtgcgtaacgcgtatgcaacctgcccgcgacagggggataacggagggaaacttccactaatatcccatggtgccggggtctcgcatggggccgcggctaaaggggcgacccggttgcggat

SEQ ID NO: 1701 - DNA, 225 bp, Unknown
  Encodes 16S rRNA from Parabacteroides
agagtttgatcctggctcaggatgaacgctagcgacaggcttaacacatgcaagtcgaggggcagcggggcgtggcaacacgccgccggcgaccggcgcactggtgagtaacacgtatgcaacctgcccatcggagggggataacccgtggaaacgcggcctaataccccgtacgcctttggatcgcatgatttggaggtgaaaggaggcgactctgtcgatgga

SEQ ID NO: 1702 - DNA, 225 bp, Unknown
  Encodes 16S rRNA from Clostridium XlVa
agagtttgatcatggctcaggacgaacgctggcggcgtgcctaacacatgcaagtcgaacggagacgaggcataagcttcccttcggggaagccgtttcgtcttagtggcggacgggtgagtaacgcgtggacaacctgccgtatgctgggggacaacagcgggaaactgctgctaataccgcataagccggggagggggcatccccatcccgggaaagatttat

SEQ ID NO: 1703 - DNA, 225 bp, Unknown
  Encodes 16S rRNA from Clostridium IV
agagtttgatcatggctcaggatgaacgctggcggcgtgcataacacattcaagtcgaacggacttagaggggcttgctcctcgaaagttagtggcggacgggtgagtaacgcgtgagcaacctgcctttttccgggggataacatcgggaaaccggtgctaataccgcataacgtacaggaaccgcatgatttttgtaccaaagattcattgggaaaagatggg

SEQ ID NO: 1704 - DNA, 225 bp, Unknown
  Encodes 16S rRNA from Clostridium IV
agagtttgatcatggctcaggacgaacgctggcggcgtgcctaacacatgcaagtcgaacggacttagctggatgcttgcatccggcgacagttagtggcggacgggtgagtaacgcgtgaataacctgcccaacagagggggataacgtttggaaacgaacgctaataccgcataatattatgatatcgcatggtattataatcaaaggagcaatccgctgatg

SEQ ID NO: 1705 - DNA, 225 bp, Unknown
  Encodes 16S rRNA from Pedobacter
agagtttgatcatggctcaggatgaacgctagcggcaggcctaatacatgcaagtcggacggtaagtgccctttcgggggcacgagagtggcggacgggtgcgtaacgcgtatgcaaccaacccccgtcttccggatagccggtggaaacgccggataatacggaatgaacccgaggaggggcatcccttcgcgggcaaggcggcgacgcggacggggacgggca

SEQ ID NO: 1706 - DNA, 225 bp, Unknown
  Encodes 16S rRNA from Helicobacter
agagtttgatcatggctcagagtgaacgctggcggcgtgcctaacacatgcaagtcgcgcgggactttacagagtatcgtaaagtctagcggcaaacgggtgagtaacacgtgggaaacctccctcagaatggggaatatctccgggaaaccggagtcaataccgcataagaccacagtttggcatcaaacaggggtcaaagcagtaatgcgttttgagatggtc

SEQ ID NO: 1707 - DNA, 225 bp, Unknown
  Encodes 16S rRNA from Proteiniclasticum
agagtttgatcatggctcaggacgaacgctggcggcgtgcctaacacatgcaagtcgagcggggacataattggaaaggcttcggcccggaaggttatgttccagcggcggacgggtgagtaacgcgtgaacaatctgtcccagacaggggaataacagatggaaacatctgctaataccgcataagaccacgacccgacatcgggatgaggtaaaaggagcaat

SEQ ID NO: 1708 - DNA, 225 bp, Unknown
  Encodes 16S rRNA from Anaplasma
agagtttgatcctggctcagaacgaacgctggcagtatgctttaaccatgcaagtcgaacgagaaagtgtagcaatatatgagtaaagtggcaaacgggtgagtaacacacaggaatctacccagtagagaggaataagcactagaaatggtgtctaatacctcataagccaatatagtaaaatatattgggaaaggattagtagtaatattaattcactattgg

SEQ ID NO: 1709 - DNA, 225 bp, Unknown
  Encodes 16S rRNA from Bacteroides
agagtttgatcatggctcaggatgaacgctagctacaggcttaacacatgcaagtcgaggggcatcatggggttggtttcggccgatcctgatggcgaccggcggatgggtgagtaacgcgtatccaacctgcccctgtcccgcggacagcccttagaaatgaggattaacccgcgatgttgcccctttgccgcatggtattggggtgaaatttttaaggacggg

SEQ ID NO: 1710 - DNA, 225 bp, Unknown
  Encodes 16S rRNA from Clostridium IV
agagtttgatcatggctcaggacgaacgctggcggcgtgcctaacacatgcaagtcgaacggagtattccgcccgagaccagatgtagcttgctacggatgggatcaatagggatacttagtggcggacgggtgagtaacgcgtgaataacctgcccaacagagggggataacgtttggaaacgaacgctaataccgcataacattacggtatcgcatggtacag

SEQ ID NO: 1711 - DNA, 225 bp, Unknown
  Encodes 16S rRNA from Mucilaginibacter
agagtttgatcatggctcaggatgaacgctagcggcaggcctaatacatgcaagtcgaacgggattgcctccttcgggaggcatgagagtggcgcacgggtgcgcaacgcgtatgcaaccaacccccgacaggcggatagccggtggaaacgccggataatacgccatggttccggtggagggcatcctctactggataaagccgagaggcggtcggggacgggc

SEQ ID NO: 1712 - DNA, 225 bp, Unknown
  Encodes 16S rRNA from unknown taxa
agagtttgatcatggctcagaacgaacgctggtagcgtggattaggcatgcaagtcgaacgggatccgggaggtagcaatacttcctggtgagagtggcggattggggaggaacacgtgagcaacctgcccttgagttggggaaaaccgttggaaacgacggctaataccggatgcggcgccccgtgacatcgcgggagcgctaaagggggccgcaaggctcccg

SEQ ID NO: 1713 - DNA, 225 bp, Unknown
  Encodes 16S rRNA from Selenomonas
agagtttgatcctggctcaggacgaacgctggcggcgtgcttaacacatgcaagtcgaacggggcgattgagagcttgctcttgaaagcctagtggcaaacgggtgagtaacgcgtaggcaacctgcctccaagatggggacaacagtccgaaaggactgctaataccgaatgttgtaccttaaccgcatggtgaaggtattaaagatggcctctatatataagc

SEQ ID NO: 1714 - DNA, 225 bp, Unknown
  Encodes 16S rRNA from Parabacteroides
agagtttacatggctcaggatgaacgctagcgacaggcctaacacatgcaagtcgcggggcagcattgaggtagcaatacttcagatggcgaccggcgcacgggtgcgtaacgcgtatccaacctggcccttactcgggtatagccctgcgaaagtaggattaatccccgatgttgtcaagatggagccttttttcttgaccaaaggcattagtcggtaagggat

SEQ ID NO: 1715 - DNA, 225 bp, Unknown
  Encodes 16S rRNA from Eubacterium
agagtttgatcatggctcaggatgaacgctggcggcgtgcctaacacatgcaagtcgagcgagatatccatgacgaattcttcggatgcctgaatggatggaaagcggcggacgggtgagtaacgcgtaggtaacctgccctgtacaaagggatagccactggaaacggtgattaataccttatgacaccgcagcatcccatggtgaagcggtcaaagattttat

SEQ ID NO: 1716 - DNA, 225 bp, Unknown
  Encodes 16S rRNA from Coprococcus
agagtttgatcatggctcaggatgaacgctggcggcgtgcttaacacatgcaagtcgaacgaagcacctcaaccgaagaagagaccagcttgctggtattggattcacccgaggtgacttagtggcgaacgggtgagtaacgcgtgggtaacctacctcttacagggggataacaattagaaatgattgctaataccgcataacactttagagccgcatggctca

SEQ ID NO: 1717 - DNA, 225 bp, Unknown
  Encodes 16S rRNA from Weissella
agagtttgatcatggctcaggatgaacgctggcggcgtgcctaatacatgcaagtcgaacgctttgtttttaattgatatgaagagcttgctctgatttgattttatctgacaaagagtggcgaacgggtgagtaacacgtgggtaacctacctcttagcaggggataacatttggaaacaagtgctaataccgtataacactaacaaccgcatggttgttagtt

SEQ ID NO: 1718 - DNA, 225 bp, Unknown
  Encodes 16S rRNA from Pedobacter
agagtttgatcatggctcaggatgaacgctagcggcaggcctaatacatgcaagtcgtacggtaaaatcctcttcgggggattgagagtggcggacgggtgcgtaacgcgtatgcaaccaacccccctcgccgggatagccggtggaaacgccggataataccggatgcgccgcgtgggaggcatctcccgtgcggcaaggcggagacgcggagggggacgggca

SEQ ID NO: 1719 - DNA, 225 bp, Unknown
  Encodes 16S rRNA from Clostridium XI
agagtttgatcatggctcaggacgaacgctggcggcgtgcctaacacatgcaagtcgagcggggacatacggaacgagggattcgtcccgagggaaatatgtttcagcggcggacgggtgagtaacgcgtgaacgatctgtccctgacagggggataacacatggaaacaggtgctaataccgcataagaccacagcgctgcatggcgcaggggtcaaaggagag

SEQ ID NO: 1720 - DNA, 225 bp, Unknown
  Encodes 16S rRNA from Sphingomonas
agagtttgatcctggctcagaaggaacgctagctatatgcttaacacatgcaagtcgaacgttgttttcggggagctgggcagaaggaaaagaggctcctagcgtgaaggttgcttgtctcgcccaggaggtgggaacagttgaaaacaaagtggcgaacgggtgcgtaatgcgtgggaatctgccgaacagttcgggccaaatcctgaagaaagctaaaaagcg

SEQ ID NO: 1721 - DNA, 225 bp, Unknown; identical to SEQ ID NO: 789
  Encodes 16S rRNA from Treponema

SEQ ID NO: 1722 - DNA, 225 bp, Unknown
  Encodes 16S rRNA from Geobacter
agagtttgatcatggctcagaacgaacgctggcggcaggcctaacacatgcaagtcgaacgtgaaaggggcttcggccctgagtaaagtggcgcacgggtgagtaacacgtgaataatctgcccttatgtctgggatagcagaccgaaaggactggtaaccccggataagcttccgcaccaaccgggtgagtggagaaaaatacgggatcgcaagaccgtatgca

SEQ ID NO: 1723 - DNA, 225 bp, Unknown
  Encodes 16S rRNA from Clostridium XlVa
agagtttgatcatggctcaggatgaacgctggcggcgtgcttaacacatgcaagtcgaacgaagatatatcagcagaggccttcgggcggatgcagatatatacttagtggcggacgggtgagtaacgcgtggagaacctgccgtatgcagggggacaacacctggaaacgggtgctaataccgcataagcgcacgtgatagcattatcgagtgtgaaaagctta

SEQ ID NO: 1724 - DNA, 225 bp, Unknown
  Encodes 16S rRNA from Filomicrobium
agagtttgatcatggctcagagcgaacgctagcggaatgctttatacatgcaagtcgaacgaacgagtttatattgagtagcaatacgatttataaatgagttagtggcaaacgggtgagtaatagttaggaacttgccgaatagtgggggacaacagatagaaatgtctgctaataccgcatattcccgagaggggaaagatttattgctatttgagaggccta

SEQ ID NO: 1725 - DNA, 225 bp, Unknown
  Encodes 16S rRNA from Prevotella
agagtttgatcatggctcaggatgaacgctagctacaggcttaacacatgcaagtcgaggggaaacgacagagagtgcttgcactttttgggcgtcgaccggcgaatgggtgagtaacgcgtatccaacctgcccttgactgagggatagcccagtgaaaactgaattaatacctcatatcctcctccgacggcatcagacgaggagtaaagatttatcggtcaa

SEQ ID NO: 1726 - DNA, 225 bp, Unknown
  Encodes 16S rRNA from Pedobacter
agagtttgatcatggctcaggatgaacgctagcggcaggcctaatacatgcaagtcggacggtaagtgccctttcgggggcacgagagtggcggacgggtgcgtaacgcgtatgcaaccaacccccgtcttccggatagccggtggaaacgccggataatacggaatgaaccctttggggggcatcccctggagggcaaggcggcgacgcggacggggacgggca

SEQ ID NO: 1727 - DNA, 225 bp, Unknown
  Encodes 16S rRNA from Pedobacter
agagtttgatcatggctcaggatgaacgctagcggcaggcctaatacatgcaagtcggacggtaagcgccccttcgggggcgcgagagtggcgcacgggtgcgtaacgcgtatgcaaccagccccgtccaggcggatagccggtggaaacgccggataatacgccacggtcccggaggggggcatccctttccgggtgaagcggagacgcgggacgggacgggca

SEQ ID NO: 1728 - DNA, 225 bp, Unknown
  Encodes 16S rRNA from Clostridium XlVa
agagtttgatcatggctcaggatgaacgctggcggcgtgcctaacacatgcaagtcgaacgaagaccccgaggcagagatttcggtcgaagccaagggaggactgagtggcggacgggtgagtaacgcgtggataacctgccccatacagggggatagcagttggaaacgactgataataccgcataagcgcacggggagacatctcctagtgtgaaaagagata

SEQ ID NO: 1729 - DNA, 225 bp, Unknown
  Encodes 16S rRNA from Bifidobacterium
agagtttgatcatggctcaggatgaacgctggcggcgtgcttaacacatgcaagtcgaacgggatcggctggagcttgctccggccgtgagagtggcgaacgggtgagtaatgcgtgaccgacctgccccatacaccggaatagctcctggaaacgggtggtaatgccggatgctccagttggatgcatgtccttctgggaaagattctatcggtatgggatggg

SEQ ID NO: 1730 - DNA, 225 bp, Unknown
  Encodes 16S rRNA from Saccharofermentans
agagtttgatcatggctcaggatgaacgctggcggcgtgcctaacacatgcaagtcgaacgaaaaactttcaccgaatgaaagatgaagattcatcagattctggatttcaccgaaagtttttagtggcggacgggtgagtaatacgtagataatctgccttctagagggaaataacagagagaaatttctgctaatgtcccataagaccacactatggcatctt

SEQ ID NO: 1731 - DNA, 225 bp, Unknown
  Encodes 16S rRNA from Ruminococcus
agagtttgatcctggctcaggacgaacgctggcggcacgcttaacacatgcaagtcgaacggagtataggagcttgcttttatacttagtggcggacgggtgagtaacacgtgagcaacctgcctttcggagaggaataatgattggaaacggtcactaatacctcataaaatatatttatcgcatggtgagtatatcaaagatttatcgccgagagatgggctc

SEQ ID NO: 1732 - DNA, 225 bp, Unknown
  Encodes 16S rRNA from Flavobacterium
agagtttgatcatggctcaggatgaacgctagcgacaggcctaacacatgcaagtcgaggggcagcgggaggtggcaacaccttgccggcgaccggcgcacgggtgcgtaacgcgtatgcaacctgtccgggacagtgggacagccccccgaaagggggattaataccgcatggctcttcaggaccgcatggtcttgaaggtaaacattcatgggtcccggctgg

SEQ ID NO: 1733 - DNA, 225 bp, Unknown
  Encodes 16S rRNA from Rhodopirellula
agagtttgatcctggctcagaatgaacgttggcggcgtggattaggcatgcaagtcgagcgggagtagcaatactccagcggcgaaagggatagtaacgcgtagttaccaacccccgggactgggatagcttttggaaacgaaaggtaataccagataacatctccggatcaaaggtgagattccgcctggggacgggactgcgtcctattagttagttggtgag

SEQ ID NO: 1734 - DNA, 225 bp, Unknown
  Encodes 16S rRNA from Roseburia
agagtttgatcctggctcaggagaaacgctggcggcgcacataagacatgcaagtcgaacggaatccagccaaatgtttaccatgaggcgaagatttagtggcggacgggtgagtaacacgtgagcaacctaccttcaggagggggataacattgagaaatcagtgctaataccgcataatactatgagaagacatcttcacatagtcaaaggatttccgcctaa

SEQ ID NO: 1735 - DNA, 225 bp, Unknown
  Encodes 16S rRNA from Prevotella
agagtttgatcatggctcaggacgaacgctggcggcacgcttaacacatgcaagtcgaggggcatcaggacggtagcttgctatcgttgctggcgaccggcgcacgggtgagtaacgcgtatccaaccttcccatgactccggttcagcccgccgaaaggcggattactcccggatggtttccgaagagggcatctgatttggaataaagattgatcggtcatgg

SEQ ID NO: 1736 - DNA, 225 bp, Unknown
  Encodes 16S rRNA from Limibacter
agagtttgatcatggctcaggatgaacgctagcggcaggcctaatacatgcaagtcgtacggtaagcgccccttcgggggtgcgagagtggcggacgggtgcgtaacgcgtatgcaaccaacccccctcgccgggatagccggtggaaacgccggataataccggatgcgccgcaggggaggcatcttcccggcggcaaggcggagacgcggagggggacgggca

SEQ ID NO: 1737 - DNA, 225 bp, Unknown
  Encodes 16S rRNA from Saccharofermentans
agagtttgatcatggctcaggacgaacgctggcggcgtgcctaacacatgcaagtcgagcgaggacaacggcttcggtcgttgttcgagcggcggacgggtgagtaacgcgtgaacaatctgtccctgacagggggataacacttggaaacaggtgctaataccgcataagaccacaggaccgcatggttcaggggtcaaaggagcaatccggtgaggggtgagt

SEQ ID NO: 1738 - DNA, 225 bp, Unknown
  Encodes 16S rRNA from Clostridium sensu stricto
agagtttgatcatggctcaggacgaacgctggcggcgtgcttaacacatgcaagtcgaacgaggtgtagcaatacaccgagtggcggacgggtgagtaacgcgtgagcaacctgcccttgtcaggggaataacacagagaaatctgtgctaataccgcatgacgttgaatcaaggcatcttgaatcaaccaaagcgaataagcggacaaggatgggctcgcgtcc

SEQ ID NO: 1739 - DNA, 225 bp, Unknown
  Encodes 16S rRNA from Clostridium III
agagtttgatcatggctcaggatgaacgctggcggcgcacataagacatgcaagtcgaacgaacttaggctctttcttttagttagagtacggttagtggcggactggtgagtaatgtataagcaacctgcctatcagaggggaataacagtgagaaatcattgctaataccgcatatgctaacagaatcgcatgatttagttaggaaaggagtaatccgctgat

SEQ ID NO: 1740 - DNA, 225 bp, Unknown
  Encodes 16S rRNA from Prevotella
agagtttgatcatggctcaggatgaacgctagctacaggcttaacacatgcaagtcgaggggcagcgggggcttagcttgctaagcttgccggcgaccggcgcacgggtgagtaacgcgtatccaaccttcccgcaggtagggaacagcccggcgaaagtcggattaatgccctatgaattcctttgatggcatctgatgaggaataaagatttatcgcctgcgg

SEQ ID NO: 1741 - DNA, 225 bp, Unknown
  Encodes 16S rRNA from Pseudoxanthomonas
agagtttgatcatggctcagagtgaacgctggcggtaggcctaacacatgcaagtcgaacggcagcacaggagagcttgctctctgggtggcgagtggcggacgggtgaggaatacatcggaatctactctgtcgtgggggataacgtagggaaacttacgctaataccgcatacgacctacgggtgaaagtgggggaccgcaaggcctcacgcgatagaatgag

SEQ ID NO: 1742 - DNA, 225 bp, Unknown
  Encodes 16S rRNA from Anaerorhabdus
agagtttgatcctggctcaggatgaacgctggcggcgtgcttaatacatgcaagtcgaacggacgctctgacaagcttgcttgaaagagtagtgcgtggcgaacgggtgagtaatacataggcaacctgccccgatgagcgggataaccaatggaaacgttggataataccgcataggtaatccgaaggcatctttggattattaaagtcgcgtttgcggcactt

SEQ ID NO: 1743 - DNA, 225 bp, Unknown
  Encodes 16S rRNA from Clostridium III
agagtttgatcatggctcaggacgaacgctggcggcgtgcctaacacatgcaagtcgaacgagaaatgatgatttgattccttcgggatgaaaagattcatggacagtggcggacgggcgagtaacgcgtgagtaacctgcccataagagagggatagccgatggaaacgtcgagtaatacctcatattgtaatttgatcgcatgattgaattatgaaagattta

SEQ ID NO: 1744 - DNA, 225 bp, Unknown
  Encodes 16S rRNA from Streptomyces
agagtttgatcctggctcaggacgaacgctggcggcgtgcttaacacatgcaagtcgaacgatgaaccggcttcggccggggattagtggcgaacgggtgagtaacacgtgggcaatctgccctgcactctgggacaagccctggaaacggggtctaataccggatacgaccgtttgaggcatctcatggcggtggaaagctccggcggtgcaggatgagcccgc

SEQ ID NO: 1745 - DNA, 225 bp, Unknown
  Encodes 16S rRNA from Pedobacter
agagtttgatcatggctcaggatgaacgctagcggcaggcctaatacatgcaagtcgaacggtaaatgtcccttcggggacatgagagtggcggacgggtgcgtaacgcgtatgcaaccaacccccctcaccgggatagccggtggaaacgccggataagaccggatgcgccggcggggaggcatctccctgtcggcaaggcggcgacgcggagggggacgggca

SEQ ID NO: 1746 - DNA, 225 bp, Unknown
  Encodes 16S rRNA from Cellulomonas
agagtttgatcatggctcaggacgaacgctggcggcgtgcttaacacatgcaagtcgaacggtgaagaccagcttgctggttggatcagtggcgaacgggtgagtaacacgtgagcaacctgcccttcactctgggataagccttggaaacggggtctaataccggatatgacgtccctacgcatgtgggggtgtggaaagatttatcggtgggggatgggctcg

SEQ ID NO: 1747 - DNA, 225 bp, Unknown
  Encodes 16S rRNA from Clostridium XlVa
agagtttgatcatggctcaggatgaacgctggcggcgtgcctaacacatgcaagtcgaacgaagcatgttggaaagagtccttcgggacgatggaagacatgacttagtggcggacgggtgagtaacgcgtgggcaacctgccgtacacagggggacaacagctggaaacggctgctaataccgcataagcgcacagctttgcatgaagcagtgtgaaaagcgca

SEQ ID NO: 1748 - DNA, 225 bp, Unknown
  Encodes 16S rRNA from Olivibacter
agagtttgatcatggctcaggatgaacgctagcggcaggcctaatacatgcaagtcgtacggtaaacggtccttcgggaccgtgagagtggcggacgggtgcgtaacgcgtatgcaaccaacccccctcgccgggatagccggtggaaacgccggataataccggatgcgccgcgtgggaggcatctcccgtgcggcaaggcggagacgcggagggggacgggca

SEQ ID NO: 1749 - DNA, 225 bp, Unknown
  Encodes 16S rRNA from Treponema
agagtttgatcctggctcagaacgaacgctggcggcgcgtcttaagcatgcaagtcgagcggcaagttggtgcttgcaccaacccagagcggcggactggtgagtaacgcgtgggtgacgcaccctccggacggggacagcccgtggaaacacggggtaataccggatacggcggcatgggctggagccatgccgggaaaggagcttcggctccgccgggggagc

SEQ ID NO: 1750 - DNA, 225 bp, Unknown
  Encodes 16S rRNA from Gelidibacter
agagtttgatcatggctcaggataaacgctagcggcaggcctaacacatgcaagtcgagcggcagcgggatgtagcaatacattgccggcgagcggcggacgggtgagtaacgcgtatgcaacctgcccaccacacggagatagccgaccgaaaggacgattaaactccgatggcattgggagccggcatcggcatccaattaaatatttataggtggtggatgg

SEQ ID NO: 1751 - DNA, 225 bp, Unknown
  Encodes 16S rRNA from Ruminococcus
agagtttcatcctggctcaggatgaacgctagctacaggcttaacacatgcaagtcgaacggagaatgcttagcttgctttgcgttcttagtggcggacgggtgagtaacacgtgagcaacctgccttttggcgagggatagcttctggaaacggatggtaatacctcataaatatagctgaatcgcatgatttagttatcaaagaatttcgccaaaagatgggc

SEQ ID NO: 1752 - DNA, 225 bp, Unknown
  Encodes 16S rRNA from Clostridium IV
agagtttgatcatggctcaggacgaacgctggcggcgtgcttaacacatgcaagtcgaacgagaatctgtggaaggagttttcggacaacggaaacagaggaaagtggcggacgggtgagtaacgcgtgaggaacctgccttggagagggggacaacagctggaaacggctgctaataccgcatgatgcgtgagggagacatctcccacacgccaaagatttatc

SEQ ID NO: 1753 - DNA, 225 bp, Unknown
  Encodes 16S rRNA from Gemmatimonas
agagtttgatcctggctcaggacgaacgctggcggcgtgcttaacacatgcaagtcacgggggcccgcaagggtaaccggcgaacgggtgcgtaacacgtgagcaatctgccgtacactgggggatagccggcccaacggccgggtaataccgcatacgttccctgtctggcatcggatggggaggaaacctccgggggtgtacgaggagctcgcggcctatcag

SEQ ID NO: 1754 - DNA, 225 bp, Unknown
  Encodes 16S rRNA from Prevotella
agagtttgatcatggctcaggatgaacgctagctacaggcttaacacatgcaagtcgaggggcagcatgaaggaagcttgcttcctttgatggcgaccggcgcacgggtgagtaacgcgtatccaaccttcccttaacttgggaatagcccggtgaaaaccggattaatgcccgatgtggtccagcgagggcatctgacccggaccaaagattttttcggttaag

SEQ ID NO: 1755 - DNA, 225 bp, Unknown
  Encodes 16S rRNA from Ethanoligenens
agagtttgatcatggctcaggacgaacgctggcggcatgcctaacacatgcaagtcgaacggagcaaagagggcttgccctttttgcttagtggcggacgggcgagtaacgcgtgagcaacctgcccctcagaggggaataacgtccggaaacggacgctaataccgcataacgcagcgggaccgcatggttctgctgccaaaggagcaatccgctgagggatgg

SEQ ID NO: 1756 - DNA, 225 bp, Unknown
  Encodes 16S rRNA from Leucobacter
agagtttgatcatggctcaggacgaacgctggcggcgtgcttaacacatgcaagtcgaacgatgaagcccagcttgctgggtggaagagtggcgaacgggtgagtaacacgtgagtaacctgcccctgactctgggataagcgctggaaacggcgtctaatactggatatgagcaatggccgcatggtctgttgttggaaagatttatcggttggggatggactc

SEQ ID NO: 1757 - DNA, 184 bp, Unknown
  Encodes 16S rRNA from Clostridium XlVa
agagtttgatcctggctcaggataaacgctggcggcgtgctttgcacaatgggggaaaccctgatgcagcgacaccgcgtgagcgatgaaatatttcggtatgtaaagctctatcagcagggaagataatgacggtacctgactaagaagcaccggctaaatacgtgccagcagccgcggtaat

SEQ ID NO: 1758 - DNA, 225 bp, Unknown
  Encodes 16S rRNA from Clostridium XlVa
agagtttgatcctggctcaggatgaacgctggcggcgtgcctaatacatgcaagtcgagcgaagcgcctgcttctgatctttcgggtgaagaaacaggcgactgagcggcggacgggtgagtaacacgtagggaacctgcctcacacagggggataacagttagaaatgactgctaataccgcataagcgcacaggaccgcatggtctggtgtgaaaagctccgg

SEQ ID NO: 1759 - DNA, 225 bp, Unknown
  Encodes 16S rRNA from Eggerthella
agagtttgatcctggctcaggatgaacgctggcggcgtgcttaacacatgcaagtcgaacgattaacccatcttcggatggttatagagtggcgaacgggtgagtaacacgtgatcaacctacctttcactttgggataactacgggaaactgtagctaataccaaatactcctggggttccgcatggcgccctagggaaagttccggcggtgaaagatgggatc

SEQ ID NO: 1760 - DNA, 225 bp, Unknown
  Encodes 16S rRNA from Prevotella
agatttgatcatggctcaggatgaacgctagctacaggcttaacacatgcaagtcgaggggtaacggcagtgaagcttgctttactggccgacgaccggcgcacgggtgagtaacgcgtatccaacctgcccatgactcagggataaccttccgaaagggagcctaatacctgatgttgtgagacgagggcatctgagtgtcaccaaagattcatcggtcatgga

SEQ ID NO: 1761 - DNA, 225 bp, Unknown
  Encodes 16S rRNA from Prevotella
agagtttgatcatggctcaggatgaacgctagctacaggcttaacacatgcaagtcgaggggcagcatgggagttgcttgcaacttctgatggcgaccggcgcacgggtgagtaacgcgtatccgaccttccctcaggtagggaacagcccggcgaaagtcggattaatgccctatagtctgcgaattgcgcatgttgtttgcagtaaagatttatcgcctgggg

SEQ ID NO: 1762 - DNA, 225 bp, Unknown
  Encodes 16S rRNA from Solobacterium
agagtttgatcatggctcaggataaacgctggcggcgtgcctaatacatgcaagtcgaacgatgaagttctcaagcttgcttgagaatagattagtggcgaacgggtgagtaatacataagcaacctacccatgaagactgggataatctctggaaacggggactaataccggataggtaagcggaccgcatgatctgcttattaaaggttaaaaacactgatgg

SEQ ID NO: 1763 - DNA, 225 bp, Unknown
  Encodes 16S rRNA from Xanthobacter
agagtttgatcctggctcagagcgaacgctggcggcaggcctaacacatgcaagtcgagcgcccggcaacgggagcggcagacgggtgagtaacgcgtggggatctacccattggtacggaataacccagggaaacttggactaataccgtatgtgtccttttggagaaagatttatcgccaatggatgaacccgcgtcggattagctagttggtggggtaaagg

SEQ ID NO: 1764 - DNA, 225 bp, Unknown
  Encodes 16S rRNA from unknown taxa
agagtttgatcctggctcagaacgaacgctggtagcgtggattaggcatgcaagtcgaacgggatccatgaagtagcaatacggattggtgagagtggcggaagggcgaggaacacgtgagcaacctgtccttgaggtggggaaaaccgttggaaacgacggctaataccgaatgtggcgcccggagacatctccggagcgctaaagggggcccaaaaggctctc

SEQ ID NO: 1765 - DNA, 225 bp, Unknown
  Encodes 16S rRNA from Desulfovibrio
agagtttgatcctggctcagattgaacgctggcggcgtgcttaacacatgcaagtcgaacgcgaaaggggcttcggccccgagtagagtggcgcacgggtgagtaacgcgtggataatctgcccctgtgactggaatagcgactggaaacggtcgataataccggatacgcccttgttgaacgatgaggggaaaggagacctctgcttgcaagtttccgtgcagg

SEQ ID NO: 1766 - DNA, 225 bp, Unknown
  Encodes 16S rRNA from Microbacterium
agagtttgatcctggctcaggatgaacgctggcggcgtgcttaacacatgcaagtcgaacggtgaaagcggagcttgctctgctggatcagtggcgaacgggtgagtaacacgtgagcaatctgcccttgactctgggataagcgctggaaacggcgtctaataccggatacgagctgcgaaggcatcttcagcagctggaaagaacttcggtcaaggatgagct

SEQ ID NO: 1767 - DNA, 225 bp, Unknown
  Encodes 16S rRNA from Oscillibacter
agagtttgatcatggctcaggatgaacgctggcggcgtgcctaacacatgcaagtcgaacgaagcattctggaaggagacttcggtcaacggaagggatgacttagtggcggacgggtgagtaacgcgtgagcaacctgcctcagagtgggggacaacagctggaaacggctgctaataccgcatgatacttttggaaggcatcttctgaaagtcaaagctttat

SEQ ID NO: 1768 - DNA, 225 bp, Unknown
  Encodes 16S rRNA from Blautia
agatttgatcatggctcaggatgaacgctggcggcgtgcctaacacatgcaagtcgaacggagatcttatggaaagcggcttcggccaatggatatctgatcttagtggcggacgggtgagtaacgcgtggggaacctgccctgtactgggggataacacccagaaatgagtgctaataccgcataagcgcacagtaccgcatggtacagtgtgaaaaactccgg

SEQ ID NO: 1769 - DNA, 225 bp, Unknown
  Encodes 16S rRNA from Papillibacter
agagtttgatcatggctcaggacgaacgctggcggcgtgcttaacacatgcaagtcgaacggagttatttccgacacggagccactgaggaattagtggttgcgtgttggggataacttagtggcgaacgggtgagtaacgcgtaagcaatctgccttacagagggggataacgtttggaaacgaacgctaataccgcataacgtcatgaagaggcatcttttta

SEQ ID NO: 1770 - DNA, 225 bp, Unknown
  Encodes 16S rRNA from Prevotella
agagtttgatcatggctcaggatgaacgctagctacaggcttaacacatgcaagtcgaggggcagcatgaagtttgcttgcaaactttgatggcgaccggcgcacgggtgagtaacgcgtatccgaccttccccctgcccaggtatagtccgctgaaaggcggtttaatccctggtgctgtcctgcgggtgcatgccatcgggacgaaaggatttccggcagggg

SEQ ID NO: 1771 - DNA, 225 bp, Unknown
  Encodes 16S rRNA from Lentisphaera
agagtttgatcatggctcagaatgaacgctggcggcatggattaggcatgcaagtcgaacgccccgggctttgcccggggagtggcgaaagggtgcgcaacgcgtggggaacccgcccccgggcccgggacaagcgctggaaacggcgtctgatacgggatgtcgagccgggccgcatggcccggcgtcgaaagattcatcgcccggggagggccccgcgtccca

SEQ ID NO: 1772 - DNA, 225 bp, Unknown
  Encodes 16S rRNA from Ruminococcus
agagtttgatcatggctcagattgaacgctggcggcacgcttaacacatgcaagtcgaacgggactaagagagaagcttgcttcacttttagtttagtggcggacgggtgagtaacacgtgagtaacctgcccttatcaggggaatagcctccggaaacggagagtaataccgcataagatgacgatgtggcatcacatagtcataaaagattttatcggataag

SEQ ID NO: 1773 - DNA, 225 bp, Unknown
  Encodes 16S rRNA from Bacteroides
agagtttgatcctggctcaggatgaacgctagcggcaggcttaacacatgcaagtcgaggggcagcgtgggggtagcaatactcccgacggcgaccggcgcacgggtgagtaacgcgtatgcaacctttcccagacagggggatagcccagggaaacttggattaataccccgtaggccagaagagggcatcctcatctggttaaagttccggcggtctggggtg

SEQ ID NO: 1774 - DNA, 225 bp, Unknown
  Encodes 16S rRNA from Catonella
agagtttgatcatggctcaggatgaacgctggcggcgtgcctaacacatgcaagtcgaacggggacgtcccgccgttgaagcttcggcagagacatgggacatcctagtggcggacgggtgagtaacgcgtgggcaacctgccctgtactgggggatagcagctggaaacggctggtaataccgcataagcgcacagtgtcgcatgacacagtgtgaaaagctcc

SEQ ID NO: 1775 - DNA, 225 bp, Unknown
  Encodes 16S rRNA from Clostridium XlVa
agagtttgatcctggctcaggatgaacgctggcggcgtgcttaatacatgcaagtcgaacggaagttattgggagcttgctcttgatgactttagtggcggacgggtgagtaacgcgtgggtaacctgcctcatacagggggataacagttagaaatgactgctaaaaccgcataacatgatggaaccgcatgatttcatcatcaaatatttataggtatgagat

SEQ ID NO: 1776 - DNA, 225 bp, Unknown
  Encodes 16S rRNA from Clostridium IV
agagtttgatcatggctcaggacgaacgctggcggcgtgcctaacacatgcaagtcgaacggagttaacaatggaagttccttcggggacggaagctgttaacttagtggcggacgggtgagtaacgcgtgagtaacctgcctttcagagggggataacgttcggaaacgaacgctaataccgcataacatagcgataccgcatggtaatgctatcaaaggagca

SEQ ID NO: 1777 - DNA, 225 bp, Unknown
  Encodes 16S rRNA from unknown taxa
agagtttgatcatggctcagaacgaacgctggtcgcgtggattaggcatgcaagtcgaacgggatccatgaagtagcaatacggattggtgagagtggcggaagggcgaggaacacgtgggcaacctgtctttgaggtggggaaaacctcgggaaactgaggctaataccgaatgtggcgcggaagggcatccttcctgcgctaaagggggcgaaagctccccct

SEQ ID NO: 1778 - DNA, 225 bp, Unknown
  Encodes 16S rRNA from Clostridium XI
agagtttgatcatggctcaggatgaacgctggcggcgtgcttaacacatgcaagtcgaacggagatacgtaaaagaagttttcggatggaatttacatatcttagtggcggacgggtgagtaacacgtaaacaatctgcctttgagagcgggataacagatagaaatatttgctaataccgcataagaccacaacatcgcatgatgaaggggtaaaaggggagca

SEQ ID NO: 1779 - DNA, 225 bp, Unknown
  Encodes 16S rRNA from Prevotella
agagtttgatcatggctcaggatgaacgctagctacaggcttaacacatgcaagtcgaggggtaacgggcagcagtgcttgcactgctgtgctgacgaccggcgcacgggtgagtaacgcgtatccaaccttcccatgagtagtgcatagcccggcgaaagtcggattaattcactatatgtggcatttcggcatctttatgtcacgaaagattcatcgctcatg

SEQ ID NO: 1780 - DNA, 225 bp, Unknown
  Encodes 16S rRNA from unknown taxa
agagtttgatcatggctcaggatgaatgctggcggcgtgcctaatacatgcaagtcgagcggtaacagggggactcaccgtactcttgacactcttgcccagagaggaagaggtcggatcgagggtacagtgagtccccgctgacgagcggcggacggctgagtaacgcgtgggaacataccccaaactgagggataactagtcgaaagattagctaataccgca

SEQ ID NO: 1781 - DNA, 225 bp, Unknown
  Encodes 16S rRNA from Mogibacterium
agagtttgatcctggctcaggatgaacgctggcggcgtgcctaatacatgcaagtcgagcgagaagccaatttgaagcgttttcggacaattctgtttggtggaaagcggcggacgggtgagtaacgcgtaggcaacctgcccttagcagagggatagccattggaaacgatgattaaaacctcataatgccgattcaacacatgttgaaccggccaaagattta

SEQ ID NO: 1782 - DNA, 225 bp, Unknown
  Encodes 16S rRNA from Clostridium XlVa
agagtttgatcctggctcaggatgaacgctggcggcgtgcctaacacatgcaagtcgaacggggtttagatgaaacctagtgattctaaacctagtggcggacgggtgagtaacgcgtgggtaacctgccgtatgcagggggacaacagttggaaacgactgctaataccgcataagcgcacagcttcacatggagcagtgtgaaaagatttatcggcatacgat

SEQ ID NO: 1783 - DNA, 225 bp, Unknown
  Encodes 16S rRNA from Ruminococcus
agatttgatcctggctcaggacgaacgctggcggcacgcttaacacatgcaagtcgaacgggactaagagagaagcttgcttcacttttagtttagtggcggacgggtgagtaacacgtgagtaacctgcccttatcaggggaatagcctctggaaacggagagtaataccgcataagatggcaatgtggcatcacatagtcataaaagattttatcggataagg

SEQ ID NO: 1784 - DNA, 225 bp, Unknown
  Encodes 16S rRNA from Eubacterium
agagtttgatcatggctcaggattaacgctggcggcgtgcctaacacatgcaagtcgagcgagaaatagtgatatgaaacttcggtagattggatctatggacagcggcggacgggtgagtaacgcgtgggcaacctgcccctttctggaggatagccaagggaaactttgaataatactccataacgcaagagcatcgcatggtgcacttgccaaagatttatc

SEQ ID NO: 1785 - DNA, 225 bp, Unknown
  Encodes 16S rRNA from Clostridium IV
agagtttgatcctggctcaggacgaacgctggcggcgtgcctaacacatgcaagtcgagcggagacataccacgaagtgaaagttttcggacggaagcggagagatatgttttagcggcggacgggtgagtaacgcgtgagcaacctgtccctcacagggggataacacatcgaaaggtgtactaataccgcatgagaccacggcgggacatctcgcaggggtca

SEQ ID NO: 1786 - DNA, 225 bp, Unknown
  Encodes 16S rRNA from Rhodomicrobium
agagtttgatcctggctcagaacgaacgctggcggcaggcttaacacatgcaagtcgaacgcgtgcagcaatgcacgagtggcgcacgggtgagtaacgcgtggatatctgccttttggttcggaataaccccgggaaactggggctaataccggatggttcctacgggataaagatttatcgccaaaagatgagtccgcgtccgattagctagttggtggggta

SEQ ID NO: 1787 - DNA, 225 bp, Unknown
  Encodes 16S rRNA from Butyricicoccus
agagtttgatcatggctcaggacgaacgctggcggcgtgcctaacacatgcaagtcgaacggagaacccacgaacgagttttcggacaagtaagtggaattcttagtggcggacgggtgagtaacgcgtgagcaacctgcctttcagagggggataacagtgggaaaccactgctaataccgcataacgtatatataaggcatcttagatataccaaaggagcaa

SEQ ID NO: 1788 - DNA, 225 bp, Unknown
  Encodes 16S rRNA from Saccharofermentans
agagtttgtcctggctcaggatgaacgctggcggcgtgcttaacacatgcaagtcgaacggagatatatgtatgaagttttcggatggaatgtatatatcttagtggcggacgggtgagtaacgcgtaaacaatctgccttagagagggggataacagatagaaatatctgctaataccgcataagaccacgtacaggcatctagacggggtaaaaggagcaatc

SEQ ID NO: 1789 - DNA, 225 bp, Unknown
  Encodes 16S rRNA from Prevotella
agagtttgatcatggctcaggatgaacgctagctacaggcttaacacatgcaagtcgaggggcagcatgggagttgcttgcaattcccgatggcgaccggcggatgggtgagtaacgcgtatccaacctgtcccgcgcgcggggacagcccttggaaatgaggattaacccccgataggccatggggccgcatggtttcatggtgaacctttgcgcgggttgggg

SEQ ID NO: 1790 - DNA, 225 bp, Unknown
  Encodes 16S rRNA from Mannheimia
agagtttgatcatggctcaggacgaacgctggcggcgtgcttaacacatgcaagtcgaacggggaatattgcacaatgggggaaaccctgatgcagccatgccgcgtgtgtgaagaaggccttcgggttgtaaagcacttttgcattcgaggaagacggcgtataaataaatgcgctatttgacgttagagtgtgaataagcaccggcaaactccgtgccagcag

SEQ ID NO: 1791 - DNA, 225 bp, Unknown
  Encodes 16S rRNA from Lactobacillus
agagtttgatcatggctcaggacgaacgctggcggcgtgcctaatacatgcaagtcgaacgagactttttatttgatgcttgcatcttttaaaaagttgagtggcgaacgggtgagtaacacgtgggtaacctgccttaaagtgggggataacacttggaaacaggtgctaataccgcataaccatcaaaaccgcctggttttgatgttaaagatggttctgcta

SEQ ID NO: 1792 - DNA, 225 bp, Unknown
  Encodes 16S rRNA from Clostridium IV
agagtttgatcctggctcaggagaaacgctggcggcgcacataagacatgcaagtcgaacggaacttagttgaatgtttacatgagacgaaagtttagtggcggacgggtgagtaacacgtgagcaacctgcctttaagagggggataacattgagaaatcagtgctaataccgcataaagcatagcattcgcatgtaagctatgccaaaggagaaatccgctta

SEQ ID NO: 1793 - DNA, 225 bp, Unknown
  Encodes 16S rRNA from Clostridium IV
agagtttgatcatggctcaggataaacgctggcggcgtgcataacacattcaagtcgaacggactgattggggagcttgctctccatgaaagttagtggcggacgggtgagtaacgcgtgagcaacctgcctttgcgagggggataacacagagaaatttgtgctaataccgcatgacgcaccgaggtcacatggccatggtgtcaaaggagcaatccgcgcaaa

SEQ ID NO: 1794 - DNA, 225 bp, Unknown
  Encodes 16S rRNA from Adlercreutzia
agagtttgatcctggctcaggatgaacgctggcggcgtgcctaacacatgcaagtcgaacggttaaaccggcttcggccggatatagagtggcgaacgggtgagtaacacgtgaccaacctgccccccgctccgggataacccagggaaacctgcgctaataccggacgatgccgcaagggcgcatgccctcgcggccgaagcccaggcggcgggggatggggtc

SEQ ID NO: 1795 - DNA, 225 bp, Unknown
  Encodes 16S rRNA from Selenomonas
agagtttgatcatggctcaggacgaacgctggcggcgtgcttaacacatgcaagtcgaacgggactgattgaaagcttgcttttgaaaagtctagtggcaaacgggtgagtaacgcgtaggcaacctgcctctaagatggggacaacagtccgaaaggactgctaataccgaatgttgtgagtttttcgcatgaaagactcattaaagatggcctctacttgtaa

SEQ ID NO: 1796 - DNA, 225 bp, Unknown
  Encodes 16S rRNA from Paenibacillus
agagtttgatcatggctcaggatgaacgctggcggcatgcctaagacatgcaagtcgtacgcgagggcccaatgaagacattgaaactgaagaagcttgcttctgatgtggatttgttggatttggattttccctcgagtggcaaacgggtgagtaacacgtgggttacctgcctctatgttggggataacagttggaaacgattgctaataccgaatatgctct

SEQ ID NO: 1797 - DNA, 225 bp, Unknown
  Encodes 16S rRNA from Clostridium IV
agagtttgatcctggctcaggacgaacgctggcggcgcgcctaacacatgcaagtcgaacggagagtgtgttttgaattcttcggaaggaaaggcacatttcttagtggcggacgggtgagtaacacgtgagcaacctgccttgtagagggggataacgattggaaacgatcgctaataccacatgatatatgggtatcgcatggtaaccatatcaaagatttat

SEQ ID NO: 1798 - DNA, 225 bp, Unknown
  Encodes 16S rRNA from Paenibacillus
agagtttgatcatggctcaggatgaacgctggcggcatgcctaagacatgcaagtcgaacgaggtggcccaatgaaggtggagtgcttgcacaatactggatttggattcccgcctagtggcagacgggtgagtaacacgtgggttacctacctctttgttggggataacagttggaaacgattgctaataccgaataagatactcgtattgaaaggagctttca

SEQ ID NO: 1799 - DNA, 225 bp, Unknown
  Encodes 16S rRNA from Butyricimonas
agagtttgatcctggctcaggatgaacgctagcggcaggcttaacacatgcaagtcgaggggcagcgcggggtagcaatactctggcggcgaccggcggaagggtgcgtaacgcgtgagcaacttgcccgtcactgggggataggcactggaaacggtgtgtaatactccataacatatggattcacatggatttatattgaaagattcgttggtgacggatggg

SEQ ID NO: 1800 - DNA, 225 bp, Unknown
  Encodes 16S rRNA from Wandonia
agagtttgatcatggctcaggatgaacgctagcggcaggcctaacacatgcaagtcgaggggcagcaggaggtagcaataccttgctggcgaccggcgcacgggtgcgtaacgcgtatgcaacctacccatgacagggggataacggagagaaatttccactaataccccgtattgttcaggaatcgcatggtttttggacgaaagcctttgggcggtcatggac

SEQ ID NO: 1801 - DNA, 225 bp, Unknown
  Encodes 16S rRNA from Puniceicoccus
agagtttgatcatggctcagagtgaacgctggcgacgtggctaagacatgcaagtcgagcgagaaggtgccttcgggtatcggaaagcggcaaacgggtgcgtaacacgtaagtaacctgcccttaagacgggaatagcttgatgaaaattgagataatgcccgatatcaaattcttccgcatggaagaagtttgaaaggtttgtgatgacgcttaaggagggac

SEQ ID NO: 1802 - DNA, 225 bp, Unknown
  Encodes 16S rRNA from Lactonifactor
agagtttgatcatggctcaggatgaacgctagctacaggcttaacacatgcaagtcgaggggcagcatcgggcagtgggggatattgcacaatgggcgcaagcctgatgcagcgacgccgcgtgaaggaagacgtatttcggtatgtaaacttctatcagcggggaagaagatgacggtacccgactaagaagccccggctaattacgtgccagcagccgcggta

SEQ ID NO: 1803 - DNA, 225 bp, Unknown
  Encodes 16S rRNA from Selenomonas
agagtttgatcatggctcaggacgaacgctggcggcgtgcttaacacatgcaagtcgaacgagacggattgaaagcttgcttttgaaatgtcgagtggcaaacgggtgagtaacgcgtagacaacctgccgcaaagatggggacaacagtccgaaaggactgctaataccgaatgttgtcaagtttccgcatgggagcttgattaaagatggcctctacttgtaa

SEQ ID NO: 1804 - DNA, 225 bp, Unknown
  Encodes 16S rRNA from Brevundimonas
agagtttgatcatggctcaggacgaacgctggcggtgtgcctcatacatgcaagtcgaacgataaggttccttcgggaatacataagtggcggacgggtgagtacaacataggaaatctgccctaaagcgggggacaacagagggaaactcctgctaataccccatatgagcttggttgaaataccaatcttgaaagatttatcactttaggatgagcctgtgcc

SEQ ID NO: 1805 - DNA, 225 bp, Unknown
  Encodes 16S rRNA from Prevotella
agatttgatcctggctcaggatgaacgctagctacaggcttaacacatgcaagtcgaggggcagcgggaagtttgcttgcaagcttcgccggcgaccggcgcacgggtgagtaacgcgtatccaacctgccccacggtcggggacagcccggcgaaagtcggattaacccccgatggtcccgcaagacggcatcagattgcgggtaaaggctcgtccgccgtggg

SEQ ID NO: 1806 - DNA, 225 bp, Unknown
  Encodes 16S rRNA from Gelidibacter
agagtttgatcctggctcaggataaacgctagcggcaggcctaacacatgcaagtcgagcggcaacgggagtagcaatacttgccggcgagcggcggacgggtgagtaacgcgtatgcaacctgcccatcacacggagatagccgaccgaaaggacgattaaactccgatggcatcaagagggggcatccccatttgattaaatattcataggtgatggatgggc

SEQ ID NO: 1807 - DNA, 225 bp, Unknown
  Encodes 16S rRNA from Mogibacterium
agagtttgatcctggctcaggatgaacgctggcggcgtgcctaatacatgcaagtcgagcgagaagctccattgaagcgttttcggacaattcaaaggagtggaaagcggcggacgggtgagtaacgcgtaggcaacctgcccttagcagagggatagccattggaaacgatgattaaaacctcataacgccaactcaacacatgttgagctggccaaagattta

SEQ ID NO: 1808 - DNA, 225 bp, Unknown
  Encodes 16S rRNA from Clostridium XlVa
agagtttgatcatggctcaggatgaacgctggcggcgtgcctaacacatgcaagtcgaacgaagttgtttccatccgacagaatatcttcggatatgaagtcaccggaaacgcttagtggcggacgggtgagtaacgcgtgggcaacctgccctacacagggggatagcggttggaaacgaccggtaataccgcatacctttattgaaccgcatgatttaataaa

SEQ ID NO: 1809 - DNA, 225 bp, Unknown
  Encodes 16S rRNA from Coprococcus
agagtttgatcatggctcagattgaacgctggcggcgtgcttaacacatgcaagtcgaacggactgatgagagagcttgctctttctgaaagttagtggcggacgggtgagtaacgcgtgggaaacctgccttacactgggggataacagatggaaacgcctgttaataccgcataagcgcacggtgctgcatggtaccgtgtgaaaaactctggtggtgtaaga

SEQ ID NO: 1810 - DNA, 225 bp, Unknown
  Encodes 16S rRNA from unknown taxa
agagtttgatcatggctcagaacgaacgctggcagcgtggattaggcatgcaagtcgaacgggatccggaaggtagcaatatcggccggtgagagtggcggaagggcgaggagcacgtggacaacctgtccagaggacggggaaaacctcgggaaactgaggctaatacccgatgcgccgggagctgggcatccatcttccggcaaagggggcgaaagctcccgc

SEQ ID NO: 1811 - DNA, 225 bp, Unknown
  Encodes 16S rRNA from Barnesiella
agagtttgatcatggctcaggatgaacgctagcgacaggcctaacacatgcaagtcgaggggcagcattatcgaagcttgctttgatagatggcgaccggcgcacgggtgagtaacgcgtatgcaacctgtccgtcatagtgggataatcccgagaaattgggtctaataccacgtatgccgtatatgggcatccatgtacggtgaaagagattcgttgacggtt

SEQ ID NO: 1812 - DNA, 225 bp, Unknown
  Encodes 16S rRNA from unknown taxa
agagtttgatcatggctcagaacgaacgctggcagcgtggatgaggcatgcaagtcgaacggtcgtgtgctggtagcaatattggtgcacgatagtggcggaagggcgagtaatgcgagagcaagctacccctcgattcggaacaacggctggaaacggccgctaatgccggatacgaacgcgaagccgcatggctttgcgttgaaaggccgggacccgcaaggg

SEQ ID NO: 1813 - DNA, 225 bp, Unknown
  Encodes 16S rRNA from Clostridium XlVa
agagtttgatcctggctcaggatgaacgctggcggcgtgcctaacacatgcaagtcgaacggagatgtgacaccggaagaggattcgtctgattccaccgttgcatcttagtggcggatgggtgagtaacgcgtggataacctgcccttcactgggggataacaaccggaaacgggtgctaataccgcataggcgcacggggccgcatggccttgagcgtaaaga

SEQ ID NO: 1814 - DNA, 225 bp, Unknown
  Encodes 16S rRNA from Anaerovorax
agagtttgatcatggctcaggatgaacgctggcggcgtgcttaacacatgcaagtcgagcgagaaacctaaaaatgacgcttcggtagattttttaggcggaaagcggcggacgggtgagtaacgcgtaggcaacctgcccttagcagagggatagcctcgggaaaccgggattaaaacctcataatactgtacattcacatgtatgtatagtcaaagatttatc

SEQ ID NO: 1815 - DNA, 225 bp, Unknown
  Encodes 16S rRNA from Bacteroides
agagtttgatcctggctcaggatgaacgctagcggcaggcttaacacatgcaagtcgaggggcagcgtgttggtagcaataccgacgacggcgaccggcgcacgggtgagtaacgcgtatgcaacctttcccagacagggggatagcccagggaaacttggattaataccccgtaggccacggatgggcatccgtctgtggttaaagttccggcggtctggggtg

SEQ ID NO: 1816 - DNA, 225 bp, Unknown
  Encodes 16S rRNA from Parasporobacterium
agagtttgatcatggctcaggatgaacgctggcggcacgcttaacacatgcaagtcgaacgaggttatggacttcggttaataacctagtggcggacgggtgcgtaacgcgtgggtaatctgcccttgacagggggataacgtatagaaatgtacgctaataccgcataagcccacgagaccgcatggtcttgagggaaaagggatactggtcaaggatgagccc

SEQ ID NO: 1817 - DNA, 225 bp, Unknown
  Encodes 16S rRNA from Prevotella
agagtttgatcatggctcaggatgaacgctagctacaggcttaacacatgcaagtcgcggggcagcatgaagccagcttgctggctttgatggcgaccggcgcacgggtgagtaacgcgtatccaacctgcccatgggcgaggcacagcccggcgaaagccggattaatgccttgcggtctccttgaaggccatccgccgaggagtaaaggcttttagccgccca

SEQ ID NO: 1818 - DNA, 225 bp, Unknown
  Encodes 16S rRNA from Parapedobacter
agagtttgatcctggctcaggatgaacgctagcggcaggcctaacacatgcaagtcgaggggcagcgcggtgtggcaacacactggcggcgaccggcggatgggtgcgtaacgcgtatgcaacctgcctccgagagggggataacccgtggaaacgcggactaataccccgtatgcgcacgacgccgcatgacgttgtgcggaaagattcattgctcggagatgg

SEQ ID NO: 1819 - DNA, 225 bp, Unknown
  Encodes 16S rRNA from Streptomyces
agagtttgatcatggctcaggacgaacgctggcggcgtgcttaacacatgcaagtcgaacggtgaaccagggcttgccctggggatcagtggcgaacgggtgagtaacacgtgggcaacctgccccagactctgggataactccgggaaaccggggctaataccggatacgacctccttgggcatcctcggaggtggaaagtttttcggtctgggatgggcccgc

SEQ ID NO: 1820 - DNA, 225 bp, Unknown
  Encodes 16S rRNA from unknown taxa
agagtttgatcctggctcaggatgaatgctggcggcgtgcctaacacatgcaagtcgagcggcagcgcgagtagtttactacttggcggcgagcggcggacggctgagtaacgcgtgggaatctgccctaaagtgagggataacgcaccgaaaggtgtgctaataccgcatatggtcttcggattaaagaatttattcgctttaggaggagcccgcgtcggatta

SEQ ID NO: 1821 - DNA, 225 bp, Unknown
  Encodes 16S rRNA from Thermotalea
agagtttgatcctggctcaggatgaacgctggcggcgtgcctaacacatgcaagtcgagcgagaaacctttcagaagattcttcggatgattcagagaggtggacagcggcggacgggtgagtaacgcgtgggcaacctgcccctatccggaggatagccaagggaaactttgaataatactccataaagcatggacatcacatggtgaccatgccaaagattta

SEQ ID NO: 1822 - DNA, 225 bp, Unknown
  Encodes 16S rRNA from Alkaliflexus
agagtttgatcctggctcaggatgaacgctagcggcaggcttaacacatgcaagtcgaggggcagcgcgggtagcaatacctggcggcgaccggcggaagggtgcgtaacgcgtgagcgacatacccgtgacagggggataacagatggaaacgtctcctaataccccataagatcatatatcgcatggtatgtgattgaaaggtgagaaccggtcacggattgg

SEQ ID NO: 1823 - DNA, 225 bp, Unknown
  Encodes 16S rRNA from Oscillibacter
agagtttgatcctggctcaggacgaacgctggcggcgtgcctaacacatgcaagtcgaacgagaatctatggacggaggcttcggccaactgaaatagaggaaagtggcgaacgggtgagtaacgcgtgagaaacctgccttggagtgggggacaacagttggaaacgactgctaataccgcataatatgcctgaggggcatccctccgggcatcaaagctttat

SEQ ID NO: 1824 - DNA, 225 bp, Unknown
  Encodes 16S rRNA from Anaerotruncus
agagtttgatcatggctcaggagaaacgctggcggcgcacataagacatgcaagtcgaacggaacttagtcgaatgttaaccaggagacgaaagtttagtggcggacgggtgagtaacacgtgagcaacctaccttagagagggggataacattgagaaatcagtgctaataccgcataaagctattagttcgcatggacaagatagccaaaggagaaatccgct

SEQ ID NO: 1825 - DNA, 225 bp, Unknown
  Encodes 16S rRNA from Spirochaeta
agagtttgatcatggctcagaacgaacgctggcggcgcgtcttaagcatgcaagtcgagcgggagtaagggagcttgcttccttatgagagcggcggactggtgagtaacacgtgggtaacgcaccctcctgacggggacagcctgtggaaacacagggtaataccggatgagatggacttctggaagggagttcatgaaaggagctacggctccgcagggggaa

SEQ ID NO: 1826 - DNA, 225 bp, Unknown
  Encodes 16S rRNA from Clostridium XI
agagtttgatcctggctcaggatgaacgctggcggcgtgcttaacacatgcaagtcgaacggagacatatgacggaagttttcggatggaagatatatgtcttagtggcggacgggtgagtaacacgtaaacaatctgcctttgagagcgggacaacagatagaaatatttgctaataccgcataagaccacaggttcgcatgaactaggggtaaaaggggagca

SEQ ID NO: 1827 - DNA, 225 bp, Unknown
  Encodes 16S rRNA from Sporotomaculum
agagtttgatcatggctcaggacgaacgctggcggcgtgcttaacacatgcaagtcgaacgaggaatgtttgaaagcttgcttttggacatttcgagtggcggacgggtgagtaacgcgtgaggaacctgtcttctacagggggataacgtcccgaaagggacgctaataccgcataagaccacagtgccgcatggcagaggggtcaaaggagagatccggtaga

SEQ ID NO: 1828 - DNA, 225 bp, Unknown
  Encodes 16S rRNA from Sporacetigenium
agagtttgatcctggctcaggacgaacgctggcggcgtgcctaacacatgcaagtcgagcgaggggaggggcttcggccccgaaccgagcggcggacgggtgagtaacgcgtgaatgatctgtcccttacaggggaataacacttggaaacaggtgctaataccgcataagaccacggtgctgcatggcactgaggtaaaaggagcgatccggtgaggggtgagt

SEQ ID NO: 1829 - DNA, 225 bp, Unknown
  Encodes 16S rRNA from Bulleidia
agagtttgatcatggctcaggataaacgctggcggcgtgcctaatacatgcaagtcgaacgaagggaaccagtttactggtgaacttagtggcgaacgggtgagtaatacgtaagcaacctgcccacggagaccgggataatccctggaaacggggactaagaccggataggcagcggaggggcatcccactgctgttaaagatggaaaacactggtggatgggc

SEQ ID NO: 1830 - DNA, 225 bp, Unknown
  Encodes 16S rRNA from Clostridium IV
agagtttgatcctggctcaggacgaacgctggcggcacgcttaacacatgcaagtcgaacggagttttgagagcttgctcttaaaacttagtggcggacgggtgagtaacacgtgagcaacctgccttcgggtgtggaataatggctggaaacgaccactaataccgcataacacgatcggaccgcatgatctgatcgtcaaaggtttaccgcctgaagatgggc

SEQ ID NO: 1831 - DNA, 225 bp, Unknown
  Encodes 16S rRNA from Syntrophomonas
agagtttgatcatggctcaggacgaacgctggcggcgtgcctaacacatgcaagtcgaacgggaattaaacgagaatttcggttcatgtttaattttagtggcggacgggtgagtaacgcgtgagaatctgcctttaagtggggaataacagttggaaacgactgctaataccgcataacatgggaaaccatcaaagggggtgcaagccctcgcttagagatgag

SEQ ID NO: 1832 - DNA, 225 bp, Unknown
  Encodes 16S rRNA from Desulfatiferula
agagtttgatcctggctcaggatgaacgctggcggcgtgcatcatacatgcaagtcgaacgagaatctatagcttgctatagaggaaagtggcggacgggtgagtaaaatatagggaatctgcccgtaagagggggacaacaaggggaaacctttgctaataccgcatatgagatattctgaaatggatatcttgaaagaatttatcgcttacggatgagcctgt

SEQ ID NO: 1833 - DNA, 225 bp, Unknown
  Encodes 16S rRNA from Hydrogenoanaerobacterium
agagtttgatcatggctcaggacgaacgctggcggcgcgcctaacacatgcaagtcgaacggagaaagttcttcggagctttcttagtggcgaacgggtgagtaacacgtgagcaacctgcctttctgagggggataacgtttggaaacgaacgctaataccgcatgacaccgtagagtcacatggctcagcggtcaaaggagtaatccgcagaaagatgggctc

SEQ ID NO: 1834 - DNA, 225 bp, Unknown
  Encodes 16S rRNA from Clostridium XlVa
agagtttgatcctggctcaggatgaacgctggcggcgtgcctaacacatgcaagtcgaacggaactttaatgaagcctagcgatttaaagtttagtggcggacgggtgagtaacgcgtgggtaacctgccgtatgcagggggacaacagttggaaacgactgctaataccgcataagcgcacagcttcgcatggagcagtgtgaaaagatttatcggcatacgat

SEQ ID NO: 1835 - DNA, 225 bp, Unknown
  Encodes 16S rRNA from Mogibacterium
agagtttgatcctggctcaggatgaacgctggcggcgtgcctaatacatgcaagtcgagcgagaaattgatcagacgcgttttcggacaagtcaggtcaatggaaagcggcggacgggtgagtaacgcgtaggcaacctgcccttagcagagggatagccattggaaacgatgattaaaacctcataatgccggaggagcacatgctccatcggccaaagattta

SEQ ID NO: 1836 - DNA, 225 bp, Unknown
  Encodes 16S rRNA from Spirochaeta
agagtttgatcatggctcagaacgaacgctggcggcgcgtcttaagcatgcaagtcgagcggtaagattggtgcttgcaccgatcctagagcggcggactggtgagtaacgcgtgggtgacctaccccgtggatgggaatagccggtagaaataccgggtaatgccgaatacggtccctgacgtcagaggtcagggaggaaaggagctccggctccgccacggga

SEQ ID NO: 1837 - DNA, 225 bp, Unknown
  Encodes 16S rRNA from Prevotella
agagtttgatcctggctcaggatgaacgctagctacaggcttaacacatgcaagtcgaggggcagcatgtcgtgtgcttgcacgcgatgatggcgaccggcgcacgggtgagtaacgcgtatccaacctgcccatgaccccgggatagcccgctgaaaagcggattaacaccggatgcggtcgaaagaggacatctgatttcgaccaaagcttcggcggtcatgg

SEQ ID NO: 1838 - DNA, 225 bp, Unknown
  Encodes 16S rRNA from Treponema
agagtttgatcctggctcagaacgaacgctggcggcgcgtcttaagcatgcaagtcgagcgggattcggtagcttgctaccgatgagagcggcggactggtgagtaacacgtaggtgacgtaccttgaggacggggacagccggcagaaatgccgggtaataccggataagctcgcgcgagccggaatcgcgcgaggaaaggagctaaggctccgcctccagagc

SEQ ID NO: 1839 - DNA, 225 bp, Unknown
  Encodes 16S rRNA from Spiroplasma
agagtttgatcatggctcaggatgaacgctggcggcatgcctaagacatgcaagtcgaacgaagtggcccaacaaaaactgcgtacttgtacaaagttggcgatggaatttccacttagtggcagacgggtgagtaatacataagtaatctgccctcaagactggaataatgtctggaaacggacactaataccggataattcatttatagataactatttatgc

SEQ ID NO: 1840 - DNA, 225 bp, Unknown
  Encodes 16S rRNA from Clostridium XlVa
agagtttgatcctggctcaggatgaacgctggcggcgtgcctaacacatgcaagtcgagcggagtaagccaccggatgaagattcgtcggattccaccggtttacttagcggcggatgggtgagtaacgcgtggacaacctgcccttcactgggggataacaaccggaaacgggtgctaataccgcatgggcgcgacgggccgcatgacctgtagcgtaaagatt

SEQ ID NO: 1841 - DNA, 225 bp, Unknown; identical to SEQ ID NO: 1526
  Encodes 16S rRNA from Bacteroides

SEQ ID NO: 1842 - DNA, 225 bp, Unknown
  Encodes 16S rRNA from Treponema
agagtttgatcatggctcagaacgaacgctggcggcgcgtcttaagcatgcaagtcgagcgggaatgtggtgcttgcaccacaggagagcggcggactggtgagtaacgcgtggatgacgcacccccctgacggggacagcctgcagaaatgcagggtgataccggatacgatcttgggtattggaagcccgagaggaaagcacctgcgggtgcgcagggggagc

SEQ ID NO: 1843 - DNA, 225 bp, Unknown
  Encodes 16S rRNA from Selenomonas
agagtttgatcctggctcaggacgaacgctggcggcgtgcttaacacatgcaagtcgaacggggcaattgaaagcttgcttttgagagcctagtggcaaacgggtgagtaacgcgtaggcaacctgccttcgggatggggacaacaggacgaaagccctgctaataccgaatgaagcatccttcctgcatgggaagggtatgaaagatggcctctgaatatgcta

SEQ ID NO: 1844 - DNA, 225 bp, Unknown
  Encodes 16S rRNA from Butyricicoccus
agagtttgatcctggctcaggacgaacgctggcggcgtgcctaacacatgcaagtcgaacggggtaccctctacggaagcttcggccgaagaagaggactacctagtggcggacgggtgagtaacgcgtgagcaacctgcctttaagagggggataacataccgaaaggtatgctaataccgcataagatattagtaccgcatgatacagatatcaaagatttca

SEQ ID NO: 1845 - DNA, 225 bp, Unknown
  Encodes 16S rRNA from Gelidibacter
agagtttgatcatggctcaggataaacgctagcggcaggcctaacacatgcaagtcgagcggcagcacggtgtagcaatacattggtggcgagcggcggacgggtgagtaacgcgtatgcaacctacctgtaacacggggatagccaaccgaaaggatgattaacacccgatagtacttttaaactgcatggtttaaaagttaaatatttataggttacagatgg

SEQ ID NO: 1846 - DNA, 225 bp, Unknown
  Encodes 16S rRNA from Acetitomaculum
agagtttgatcctggctcaggatgaacgctggcggcgtgcctaacacatgcaagtcgaacggagccggatggaaggagccttcgggtgacagaaatccatgcttagtggcggacgggtgagtaacgcgtgggcaacctgccctgtggagggggatacctgttggaaacggcagttaataccccatgagcgcacgcctgtgcatgcaggcgtgtgaaaaggagcaa

SEQ ID NO: 1847 - DNA, 225 bp, Unknown
  Encodes 16S rRNA from Proteiniclasticum
agagtttgatcatggctcaggacgaacgctggcggcgtgcttaacacatgcaagtcgagcggggataatgagacggaaggcttcggccggaagacttattattctagcggcggacgggtgagtaacgcgtgaatgatctgtctcttacagggggataacacttggaaacaggtgctaataccgcataagaccacggggctgcatggctttggggtaaaaggagca

SEQ ID NO: 1848 - DNA, 225 bp, Unknown
  Encodes 16S rRNA from Papillibacter
agagtttgatcatggctcaggatgaacgctggcggcgtgcataacacattcaagtcgaacgaagcactgtcgaggaagtcttcggacggaattgactttgacttagtggcggacgggtgagtaacgcgtgagcaaccttcctgcctgtgagggataacacagggaaacttgtgctaataccgcatgaagcatgattatcgcatggtagacatgccaaagattaat

SEQ ID NO: 1849 - DNA, 225 bp, Unknown
  Encodes 16S rRNA from Prevotella
agagtttgatcctggctcaggatgaacgctagcggcaggcttaacacatgcaagtcgaggggcagcgcggtagtagcaatactactggcggcgaccggcgaaagggtgcgtaacgcgtgagcgacatgcccgcgaccgggggataacagatggaaacgtctactaataccccataacaacagggttcgcatggatcttgtttgaaagatttatcgtttgcggatt

SEQ ID NO: 1850 - DNA, 225 bp, Unknown
  Encodes 16S rRNA from Elusimicrobium
agagtttgatcctggctcagagttaacgctggcagcgtgcataacacatgcaagtcgaacggggattattcgatgtagcaatacattggataattctagtggcagacgagtgagtaatacataagaaatctacccgaaagtggggaataacgggccgaaaggttcgctaataccccataatatttgaaagcggcatcgctttcttcttaaaggtttttcgctttc

SEQ ID NO: 1851 - DNA, 225 bp, Unknown
  Encodes 16S rRNA from Lachnospiracea incertae sedis
agagtttgatcatggctcaggatgaacgctggcggcgcgcttaacacatgcaagtcgaacggaatttatagcttcggttgtaaattcagtggcggacgggtgagtaacgcgtggataacttgccttttagtgggggatagctgagagaaatctcaattaataccgcataaagtaatttattcgcatgaatagattaataaagatgaaaatcgctaaaagataggt

SEQ ID NO: 1852 - DNA, 225 bp, Unknown
  Encodes 16S rRNA from Devosia
agagtttgatcatggctcagaacgaacgctgtcgacatgcttaacacatgcaagtcggacgggtataacttgttataccagtggcaaacgggtgagtaatacgtagaaatgtacccagtagttccgaataacaactggaaacggttggtaatacgggataagatagagatatgaaagatctgaaaggatcgctattggagcagtctacgatggattagatagttg

SEQ ID NO: 1853 - DNA, 225 bp, Unknown
  Encodes 16S rRNA from Roseburia
agagtttgatcctggctcaggatgaacgctggcggcgtgcctaacacatgcaagtcgagcggacctgacggagtgaatagcttgctaggaactccagactggttagcggcggacgggtgagtaacgcgtgggtaacctgcctcatacagggggatagcagttggaaacgactggtaataccgcataagcgcacagtaccgcatggtacggtgtgaaaaactccgg

SEQ ID NO: 1854 - DNA, 225 bp, Unknown
  Encodes 16S rRNA from Mucilaginibacter
agagtttgatcatggctcaggatgaacgctagcggcaggcctaatacatgcaagtcggacgggaactccccttcgggggagcgagagtggcgcacgggtgcgtaacgcgtatgcaaccaaccccgcactgggggacagccggtggaaacgccgggtaataccccatgccgaccctgtggggcatcccatggggtcgaaagcagcgatgcggtgcgggacgggcat

SEQ ID NO: 1855 - DNA, 225 bp, Unknown
  Encodes 16S rRNA from Mogibacterium
agagtttgatcatggctcaggatgaacgctggcggcgtgcctaatacatgcaagtcgagcgagaatcttcagaaacaattcttcggatgcgtttcaggagaggaaagcggcggacgggtgagtaacgcgtaggcaacctgcccctggcagagggatagccattggaaacgatgattaaaacctcataacgcttcaagagcacatgctgttgaagccaaagattta

SEQ ID NO: 1856 - DNA, 225 bp, Unknown
  Encodes 16S rRNA from Saccharofermentans
agagtttgatcctggctcaggacgaacgctggcggcgtgcctaacacatgcaagtcgagcggagatattttccggaaagcttcggccggaaggggaatattttagcggcggacgggtgagtaacgcgtgagcaacctttccttcacagggggataaagcaccgaaaggtgccctaataccgcatgagaccacggcatcacatgaagcaggggtcaaaggagcaat

SEQ ID NO: 1857 - DNA, 225 bp, Unknown
  Encodes 16S rRNA from Paenibacillus
agagtttgatcatggctcaggattaacgctggcggcatgcctaagacatgcaagtcgaacgagagggcccattgacatttatcgaaagttgaagtgcttgcactgatgctggacttatttagatttggattttccctctagtggcaaacgggtgagtaacacgtgggttacctgcctcttagactgggataccgattggaaacgatcgttaataccggatgttct

SEQ ID NO: 1858 - DNA, 225 bp, Unknown
  Encodes 16S rRNA from Anaerotruncus
agagtttgatcatggctcaggacgaacgctggcggcgcgcttaacacatgcaagtcgaacggagttgatttttaacacccgagtctgcgaggcaggagctttgcagattgggggttaagaatcaacttagtggcggacgggtgagtaacacgtgagcaacctgcctttcagagggggataacgtctggaaacggacgctaataccgcatgaagtatatttttcgc

SEQ ID NO: 1859 - DNA, 225 bp, Unknown
  Encodes 16S rRNA from Leucobacter
agagtttgatcctggctcaggacgaacgctggcggcgtgcttaacacatgcaagtcgaacgctgaagcccggagcttgctctgggtggatgagtggcgaacgggtgagtaacacgtgagtaacctgcccctcactctgggataagcgctggaaacggcgtctaatactggatatgacccataccggcatcggtagtgggtggaaagatttatcggtgggggatgg

SEQ ID NO: 1860 - DNA, 225 bp, Unknown
  Encodes 16S rRNA from Clostridium XlVa
agagtttgatcatggctcaggatgaacgctggcggcgtgcctaacacatgcaagtcgagcggagaggctgcggagattcaatagatgatctgcatcttcttagcggcggatgggtgagtaacacgtgggtaacctgccctgcactggggaataacagttggaaacgactgttaataccgcatatgcgcacggggtcgcatgaccccgggcggaaagatttatcgg

SEQ ID NO: 1861 - DNA, 225 bp, Unknown
  Encodes 16S rRNA from Eubacterium
agagtttgatcatggctcaggatgaacgctagcggcaggcttaacacatgcaagtcgaggggcatcgcggggtagcaataccctggcggcgaccggcgaaagggtgcgtaacgcgtgagcgacatgcccgtcacagggggataaccggcggaaacgccgcctaataccccatatgaggccaggccacatggctgggtcttgaaagtcaaggcggtgacggattgg

SEQ ID NO: 1862 - DNA, 225 bp, Unknown
  Encodes 16S rRNA from Beijerinckia
agagtttgatcctggctcagaacgaacgctggcggcaggcttaacacatgcaagtcgaacggaacatagggagcttgctccttatgtcagtggcgcacgggtgagtaacgcgtaggaatctgtccttttgcctgggatagcctctggaaacggagggtaaaaccggatgagccctaagggggaaatgagcaatcagctggaggaggagcctgcgttagattaggc

SEQ ID NO: 1863 - DNA, 225 bp, Unknown
  Encodes 16S rRNA from Prevotella
agagtttgatcctggctcaggatgaacgctagctacaggcttaacacatgcaagtcgaggggcagcgggagagtagcttgctactcttgccggcgaccggcgcacgggtgagtaacacgtatccaacctgccctgaaccccgggatagccctctgaaaggaggattaataccggatgtggccgctgggggacatcccccggcgtctaaagattcatcggttgagg

SEQ ID NO: 1864 - DNA, 225 bp, Unknown
  Encodes 16S rRNA from Clostridium III
agagtttgatcatggctcaggacgaacgctggcggcgtgcctaacacatgcaagtcgagcggaggaaatcgaaagaagccttcgggtgaattttggtggacttagcggcggacgggtgagtaacgcgtgagtaacctgcccataagagggggataatccttggaaacggggactaataccgcatatagagtatttgttgcatgattgatacttgaaagatttatc

SEQ ID NO: 1865 - DNA, 225 bp, Unknown
  Encodes 16S rRNA from unknown taxa
agagtttgatcctggctcaggacgaacgctggcggcgtgcttcatacatgcaagtcgaacgagaaattaccttcgggtaatggacagtggcggacgggtgagtaatgtgtagagaatctgccctttagtgggggatagcagttggaaacgactattaataccccatatgcgcgtagttgggatactattcgtgaaagattaatcgctaaaggatgagtctgcatc

SEQ ID NO: 1866 - DNA, 225 bp, Unknown
  Encodes 16S rRNA from Pseudoflavonifractor
agagtttgatcctggctcaggacgaacgctggcggcgtgcttaacacatgcaagtcgaacgagggtattagtcagcttgctgattgatacccgagtggcggacgggtgagtaacgcgtgaggaacctgtcttcatcagggggataacttcccgaaagggatgctaataccgcataagaccacgataccgcatggtattgaggtcaaaggagcaatccggatgaag

SEQ ID NO: 1867 - DNA, 225 bp, Unknown
  Encodes 16S rRNA from Butyrivibrio
agatttgatcatggctcaggatgaacgctggcggcgtgcctaacacatgcaagtcgaacggacgctttgaggagagtcttcggatgattcttaaagttgttagtggcggacgggtgagtaacgcgtggggaacctgcctttgtccgggggatagcagctggaaacggctggtaataccgcataagaccacgaagccgcatggctttgcggtaaaagatttatcgg

SEQ ID NO: 1868 - DNA, 225 bp, Unknown
  Encodes 16S rRNA from Acholeplasma
agagtttgatcctggctcaggatgaacgctggcggcgtgcctaatacatgcaagtcgaacggatcacttcggtgatcagtggcgaacgggtgagtaacacataaacaatctaccctgaagactgggataacggttggaaacgaccgctaataccggataggtgatcataaggcatcttgagatcattaaagttgggctgcaacactgcaggatgagtttatgtcg

SEQ ID NO: 1869 - DNA, 225 bp, Unknown
  Encodes 16S rRNA from Filomicrobium
agagtttgatcctggctcagaacgaacgctggcggcaggccttagatatgcaagttgaacggtctaaggtggagcttgctctactttagatagtagcggacgggtgagtaatacatgggaacgtaccctcttgtggggaatagcttttggaaacgaaaggtaataccgcataagccctacgggggaaaggagtaattcgcgagaggatcggcccatgccagatta

SEQ ID NO: 1870 - DNA, 225 bp, Unknown
  Encodes 16S rRNA from Clostridium III
agagtttgatcctggctcaggacgaacgctggcggcgtgcctaacacatgcaagtcgaacgagaagtgatgaaaagattccttcgggatgattagattcatggacagtggcggacgggcgagtaacgcgtgagtaacctgcccataagcgggggatagccgatggaaacgtcgagtaataccccatgacgtatatatatcgcatggtatatatatcaaagattta

SEQ ID NO: 1871 - DNA, 225 bp, Unknown
  Encodes 16S rRNA from Pseudoflavonifractor
agagtttgatcatggctcaggatgaacgctggcggcgtgcataacacattcaagtcgaacgaagcactttggacggatcccttcggggtgaagactgatttgacttagtggcggacgggtgagtaacgcgtgagcaacctgccttgaagagggggataacacagggaaacttgtgctaataccgcataacatacgtgaatcgcatggttcgtgtatcaaagctcc

SEQ ID NO: 1872 - DNA, 225 bp, Unknown
  Encodes 16S rRNA from Anaerophaga
agagtttgatcatggctcaggatgaacgctagcgacaggcttaacacatgcaagtcgaggggcagcgagtggcgttgttcgcaacgccatgtcggcgaccggcgcactggtgagtaacacgtatgcaacctgccctttaccggggcataacccttggaaacgaggcctaattccccatatacagcgcttgggcatccgggtgctgtgaaaggtttattccggtga

SEQ ID NO: 1873 - DNA, 225 bp, Unknown
  Encodes 16S rRNA from Lachnospiracea incertae sedis
agagtttgatcctggctcaggatgaacgctggcggcgtgcctaacacatgcaagtcgaacgaagctcctttgcggatctcttcggagtgaaggaaaggatgactgagtggcggacgggtgagtaacgcgtgggtaatctgccctgtacagggggacaacagttagaaatgactgctaataccgcatgagcgtacagcatcgcatgatgcagtgcgaaaaactgag

SEQ ID NO: 1874 - DNA, 225 bp, Unknown
  Encodes 16S rRNA from Asaccharobacter
agagtttgatcctggctcaggatgaacgctggcggcgtgcttaacacatgcaagtcgaacggttaagccgacttcggtcgggaatacagtggcgaacgggtgagtaacacgtgaccaacctgccccccgcaccgggacaacctccggaaacggaggctaataccggatatgcccgggcgcccgcatgggcggccggggaaagcccaggcggcgggggatggggtc

SEQ ID NO: 1875 - DNA, 225 bp, Unknown
  Encodes 16S rRNA from Kordia
agagtttgatcatggctcaggataaacgctagcggcaggcctaacacatgcaagtcgagcggcagcgtggatagcaatatctgacggcgagcggcggacgggtgagtaacgcgtatgcaacctacccactacacaaggatagccttccgaaaggaggattaatacttgatagtactctaagatggcatcaaaacagagttaaagatttatcggtagtggatgggc

SEQ ID NO: 1876 - DNA, 225 bp, Unknown
  Encodes 16S rRNA from Ruminococcus
agatttgatcatggctcaggacgaacgctggcggcacgcttaacacatgcaagtcgaacgggactaagagagaagcttgcttcacttttagtttagtggcggacgggtgagtaacacgtgagtaacctgcccttatcaggggaatagcctccggaaacggagagtaataccgcataagatgacagtacggcatcgtacagtcataaaagattttatcggataagg

SEQ ID NO: 1877 - DNA, 225 bp, Unknown
  Encodes 16S rRNA from Clostridium III
agagtttgatcctggctcaggacgaacgctggcggcgtgcctaacacatgcaagtcgaacgagaaatgatgatttgattccttcgggatgaaaagaatcatggacagtggcggacgggcgagtaacgcgtgagtaacctgcccataagagagggatagccgatggaaacgtcgagtaatacctcatattgtaattaattcgcatggattgattatgaaagattta

SEQ ID NO: 1878 - DNA, 225 bp, Unknown
  Encodes 16S rRNA from Ethanoligenens
agagtttgatcatggctcaggataaacgctggcggcgtgcataacacattcaagtcgaacggaactgtacggattaatccttcgggaagcgtttgtacagtttagtggcggacgggtgagtaacgcgtgagcaacctgcctacgagaggggaataacgtctggaaacggacgctaataccgcataaaccgcggggttcgcatggactccggggcaaagatttatc

SEQ ID NO: 1879 - DNA, 225 bp, Unknown
  Encodes 16S rRNA from Clostridium XlVa
agagtttgatcctggctcaggatgaacgctggcggcgtgcctaacacatgcaagtcgaacggagatgtccaatgggctgcttcggcagtccgggcatcttagtggcggacgggtgagtaacgcgtggagaacctggcccatgcagggggataacagcgggaaaccgctgctaataccgcataagcgccgaggggggcatcccttttggtggaaagcgtaagcggc

SEQ ID NO: 1880 - DNA, 225 bp, Unknown
  Encodes 16S rRNA from Barnesiella
agagtttgatcatggctcaggatgaacgctagcgacaggcctaacacatgcaagtcgaggggcagcacggtgtagcaatacactggtggcgaccggcgcacgggtgcgtaacaggtatgcaatctgtcccataccggggcatagcccgctgaaaggcggattaattctccatgtgtcatgagagggcatccttttatgatgaaacgtaagggtatgggatgagca

SEQ ID NO: 1881 - DNA, 225 bp, Unknown
  Encodes 16S rRNA from Eubacterium
agagtttgatcatggctcaggatgaacgctggcggcgtgcctaacacatgcaagtcgagcgagaatcttcggaaggaatcttcggaggacggaaggagaggaaagcggcggacgggtgagtaacgcgtaggtaacctgccctgtacagagggatagccactggaaacggtgattaataccttataaaactgagtattcacatggagattcagtcaaagatttatc

SEQ ID NO: 1882 - DNA, 225 bp, Unknown
  Encodes 16S rRNA from Prevotella
agagtttgatcctggctcaggatgaacgctagctacaggcttaacacatgcaagtcgaggggcagcatggaggttgcttgcaacttctgatggcgaccggcgcacgggtgagtaacgcgtatccgaccttcccccaggtagggaacagcccggcgaaagtcggattaatgccctatagtctgcgaattgcgcatgttgtttgcagtaaagattgatcgccttggg

SEQ ID NO: 1883 - DNA, 225 bp, Unknown
  Encodes 16S rRNA from Anaerophaga
agagtttgatcatggctcaggatgaacgctggcggcgtgcttaacacatgcaagtcgaggggcagcatgggaggtggcaacaccacccgatggcgaccggcgcactggtgagtaacacgtatgcaacctgccccctacagggggataatccagagaaatttggtctaataccccgtagtcagcgagagggcatcctcttgctgggagagctccggcggtagggga

SEQ ID NO: 1884 - DNA, 225 bp, Unknown
  Encodes 16S rRNA from Acetitomaculum
agagtttgatcctggctcaggatgaacgctggcggcgtgcctaacacatgcaagtcgaacggggatgcctcgccgttgaagcttcggcagagacatgagacatcctagtggcggacgggtgagtaacgcgtgggcaacctgccctgtactgggggatagcagctggaaacggctggtaataccgcataagcgcgcggcatcgcatggtgctgcgtgaaaagccga

SEQ ID NO: 1885 - DNA, 225 bp, Unknown
  Encodes 16S rRNA from Prevotella
agagtttgatcctggctcaggatgaacgctggcggcgtgcctaacacatgcaagtcgaggggcagcatgaaggttgcttgcaacctttgatggcgaccggcggatgggtgcgtaacgcgtatccaacctgcctgtgtcccgggcatagcccgtggaaacgcggattaactcccgatggtgcagcggtgccgcatggcgttgctgccaaatgtaaaggacacagat

SEQ ID NO: 1886 - DNA, 225 bp, Unknown
  Encodes 16S rRNA from Clostridium III
agagtttgatcctggctcaggacgaacgctggcggcgtgcctaacacatgcaagtcgaacgagaaatgatgatttgattctttcgggatgaaatgattcatggacagtggcggacgggcgagtaacgcgtgagtaacctgcccataagagagggatagccgatggaaacgtcgagtaataccacatattgtagtaagatcgcatggttttgctatgaaagattta

SEQ ID NO: 1887 - DNA, 225 bp, Unknown
  Encodes 16S rRNA from Marinoscillum
agagtttgatcatggctcaggatgaacgctggcggcaggcttaatacatgcaagtcgaacggtaaggcctgatgtagcaatacagagggtacacgagtggcgcacgggtgcgtaacgcgtatgtaatctgcctgcaaccgggacaaaacagttggaaacggctgctaatatcccatggtcaatttttcaggcatctgggagattgtaaagatttattggttgcag

SEQ ID NO: 1888 - DNA, 225 bp, Unknown
  Encodes 16S rRNA from Pedobacter
agagtttgatcctggctcaggatgaacgctagcggcaggcctaatacatgcaagtcgaacggtaaagtccccttcgggggattgagagtggcggacgggtgcgtaacgcgtatgcaaccaacccccctcaccgggatagccggtggaaacgccggataagaccggatgcgccggcggggaggcatctccctgtcggcaaggcggcgacgcggagggggacgggca

SEQ ID NO: 1889 - DNA, 225 bp, Unknown
  Encodes 16S rRNA from Prevotella
agagtttgatcctggctcaggatgaacgctagctacaggcttaacacatgcaagtcgaggggcagcatgaatcaagcttgcttgatttgatggcgaccggcgcacgggtgcgtaacgcgtatccaacctacccgtcactcagggatagccttgcgaaagtaagattaatacctgatggtctccttccggggcatcccggttggagtaaagattcatcggtggcgg

SEQ ID NO: 1890 - DNA, 225 bp, Unknown
  Encodes 16S rRNA from Prevotella
agagtttgatcatggctcaggatgaacgctagctacaggcttaacacatgcaagtcgaggggcatcatgggggttgtttacaatccctgatggcgaccggcgcacgggtgagtaacgcgtatccaacctgccttcgagtcagggataaccttccgaaagggagcctaatacctgatgcagtgcgaagatggcatcagatttgcactaaagcttttgcgctcgggg

SEQ ID NO: 1891 - DNA, 225 bp, Unknown
  Encodes 16S rRNA from Anaerovorax
agagtttgatcctggctcaggatgaacgctggcggcgtgcctaacacatgcaagtcgagcgagaagcttttcagtcgattcttcggaaaagacagagaagtggaaagcggcggacgggtgagtaacgcgtaggcaacctgccccttgcagagggatagcctcgggaaaccgggattaaaacctcataatgcatccacatgacatcttgaggatgccaaagattta

SEQ ID NO: 1892 - DNA, 225 bp, Unknown
  Encodes 16S rRNA from Clostridium XlVa
agagtttgatcatggctcaggatgaacgctggcggcgtgcttaatacatgcaagtcgaacgaagcgccctgtacagatttcttcggaatgaagttttgggtgacttagtggcggacgggtgagtaacgcgtgggtaacctgcctcatgcagggggacaacagctggaaacggctgctaataccgcataagcgcacgagatcgcatgatcaagtgtgaaaagattt

SEQ ID NO: 1893 - DNA, 225 bp, Unknown
  Encodes 16S rRNA from Clostridium IV
agagtttgatcctggctcaggatgaacgctggcggcgtgcataacacattcaagtcgaacgaagcactggcgaggaagtcttcggatggaattgcctttgacttagtggcggacgggtgagtaacgcgtgagcaaccttcctggtagtgagggataacacagggaaacttgtgctaataccgcatgacgcactgaggtcgcatggttttagtgccaaagatttat

SEQ ID NO: 1894 - DNA, 225 bp, Unknown
  Encodes 16S rRNA from Lachnospiracea incertae sedis
agagtttgatcctggctcaggatgaacgctggcggcgcgcttaacacatgcaagtcgaacggaatgattggcttcggtcatgaattcagtggcgaacgggtgagtaacacgtggataacttgccttttagtgggggatagctgagagaaatctcaattaataccgcataatgtaatctattcgcatgaatagattaataaagatgaaaatcgctaaaagataggt

SEQ ID NO: 1895 - DNA, 225 bp, Unknown
  Encodes 16S rRNA from Clostridium sensu stricto
agagtttgatcctggctcaggacgaacgctggcggcatgcctaacacatgcaagtcgaacgggataagtttggttgtagcgatacttttgaacttattcagtggcgaacgggtgagtaacacgtgagcaacctgccttttacacagggataacagttggaaacgactgctaataccggataagaccacactgaggcatctcagaggggtcaaagcgattcagcgg

SEQ ID NO: 1896 - DNA, 225 bp, Unknown
  Encodes 16S rRNA from Lishizhenia
agagtttgatcctggctcaggatgaacgctagcggcaggcctaacacatgcaagtcgaggggcagcgcgaggtagcaataccttggcggcgaccggcggacgggtgcgtaacgcgtatggaaccaacccgtcacagggggacaagccagggaaacttggtctaataccccatactactgttaaatcgcatggtatgacagtgaaagcttacgggcggtgacggac

SEQ ID NO: 1897 - DNA, 225 bp, Unknown
  Encodes 16S rRNA from Pedobacter
agagtttgatcctggctcaggatgaacgctagcggcaggcctaatacatgcaagtcgtacgggatctccccttcgggggagtgagagtggcgcacgggtgcgtaacgcgtatgcaaccaaccctcatccgggggacagccggtggaaacgccgggtaataccccatatccactttgggaggcatcttctgaggtggaaaggctttggtcggaggaggacgggcat

SEQ ID NO: 1898 - DNA, 225 bp, Unknown
  Encodes 16S rRNA from Howardella
agagtttgatcatggctcaggagaaacgctggcggcgcacataagacatgcaagtcgaacggaacttagattgatgtttacattgaactaagtttagtggcggactggtgagtaacacgtgagcaacctgccctttagagggggataacattgagaaatcagtgctaataccgcataacgcaattcttccgcatgaaagaattgccaaaggagaaatccgcttaa

SEQ ID NO: 1899 - DNA, 225 bp, Unknown
  Encodes 16S rRNA from Roseburia
agagtttgatcctggctcaggatgaacgctggcggcgtgcttaacacatgcaagtcgaacggactttactgaaaagagggcttgcccaatggaaggtaaagttagtggcggacgggtgagtaacgcgtgggcaacctgccttacacagggggacaacagttggaaacgactgctaataccgcataagccggtagtgccgcatggcacatccggaaaagattgtat

SEQ ID NO: 1900 - DNA, 225 bp, Unknown
  Encodes 16S rRNA from Clostridium XlVa
agagtttgatcatggctcaggatgaacgctggcggcgtgcttaatacatgcaagtcgaacggggatgtccacccgatgaagccagagtgcttgcacaaaggccgattcaaccgggcatcctagtggcggacgggtgagtaacgcgtgggtaacctgcctcatactggggaataacagtcagaaatgactgctaataccgcataagcgcacagtgccgcatggcac

SEQ ID NO: 1901 - DNA, 225 bp, Unknown
  Encodes 16S rRNA from Anaerovorax
agagtttgatcatggctcaggatgaacgctggcggcgtgcctaacacatgcaagtcgagcgggaaatattgaaatgaaacttcggtagattttcgatatggagagcggcggacgggtgagtaacgcgtaggcaacctgcccctggcagagggatagccactggaaacggtgattaaaacctcataacgcgcagatgctgcatagcaactgcgccaaagatttatc

SEQ ID NO: 1902 - DNA, 225 bp, Unknown
  Encodes 16S rRNA from Lentisphaera
agagtttgatcatggctcagaatgaacgctggcggcatggattaggcatgcaagtcgaacggcagggcagcgatgcccgagagtggcgaaagggtgagcaacgcgtggggaacctgcccccgggaccggaacaagcctgtgaaaacgggtctgaaaccggatgaagccccgcaccgcatggtgcggcggcgaaatattcatagcccggggagggccccgcgtccc

SEQ ID NO: 1903 - DNA, 225 bp, Unknown
  Encodes 16S rRNA from Prevotella
agagtttgatcatggctcagattgaacgctggcggcaggcttaacacatgcaagtcgaggggcagcatgggaggtggcaacaccacccgatggcgaccggcgcactggtgagtaacacgtatgcaacctgccccctacagggggataatccagagaaatttggtctaataccccgtagtcagcgagagggcatcctcttgctgggagagctccggcggtagggga

SEQ ID NO: 1904 - DNA, 225 bp, Unknown
  Encodes 16S rRNA from Saccharofermentans
agagtttgatcctggctcagaacgaacgctggcggcgcgtcttaagcatgcaagtcgagcgggaataagggagcttgcttccttatgagagcggcggactggtgaggtaacggcccaccaaacctacgatcggtagccgaactgagaggttgatcggccacattgggactgagacacggcccagactcctacgggaggcagcagtggggaatattgggcaatggg

SEQ ID NO: 1905 - DNA, 225 bp, Unknown
  Encodes 16S rRNA from unknown taxa
agagtttgatcctggctcaggacgaacgctggcggtgtgcctcatacatgcaagtcgaacgagaagctgacttcggttagtggaaagtggcggacgggtgagtacaacataggaaatctgccccaaagcgggggacaacagagggaaacttctgctaataccccatacgagcttagttgaaatactaatcttgaaagatttatcactttgggatgagcctgtgcc

SEQ ID NO: 1906 - DNA, 225 bp, Unknown
  Encodes 16S rRNA from Proteiniphilum
agagtttgatcatggctcaggatgaacgctagcgacaggcttaacacatgcaagtcgaggggcagcatgggcgtggcaacacgcctgatggcgaccggcgcactggtgagtaacacgtatgcgacctgcctccttcagggggataacccagagaaatttggcctaataccccatagtccgcgcggctgcatggccgtgcggggaaagcctcggcggaaggagatg

SEQ ID NO: 1907 - DNA, 225 bp, Unknown
  Encodes 16S rRNA from Schwartzia
agagtttgatcctggctcaggacgaacgctggcggcgtgcttaacacatgcaagtcgaacgaggcgatttgaaagcttgcttttgatgagcctagtggcaaacgggtgagtaacgcgtaggcaacctgccctcaggatggggacaacggcccgaaaggaccgctaataccgaatgacgtatcgggaccgcatgatcctgataccaaaggcggagcaatccgtcac

SEQ ID NO: 1908 - DNA, 225 bp, Unknown
  Encodes 16S rRNA from Anaerorhabdus
agagtttgatcatggctcaggatgaacgctggcggcgtgcttaatacatgcaagtcgaacgaacaaaatcagaaagcttgctttttgatctagttagtggcgaacgggtgagtaatacgtaggcaacctacctcaaagagggggatagcagttggaaacgactattaataccgcataggtaatgaaggggcatccctacattattaaaggtgcgtttgcaccgct

SEQ ID NO: 1909 - DNA, 225 bp, Unknown
  Encodes 16S rRNA from Robinsoniella
agagtttgatcctggctcaggatgaacgctggcggcgtgcctaacacatgcaagtcgagcgatgaataaaccgacaaggtttcggccaaggaagtttattcagagcggcggatgggtgaggaacgcgtggggaacctgcctttcaccgggggataccagctggaaacggctgttaataccgcatatgctcacagtgccgcatggcacagggaggaaaactccggg

SEQ ID NO: 1910 - DNA, 225 bp, Unknown
  Encodes 16S rRNA from Clostridium IV
agagtttgatcatggctcaggacgaacgctggcggcgtgcctaacacatgcaagtcgaacggagtgttgcgctgaaattgagattagcttgctaaaggatatttcttgtaacacttagtggcggacgggtgagtaacgcgtgagtaacctgccttacagagggggacaacagttggaaacgactgctaataccgcataaagttttttgtaggcatctataagaaa

SEQ ID NO: 1911 - DNA, 225 bp, Unknown
  Encodes 16S rRNA from Erysipelotrichaceae incertae sedis
agagtttgatcatggctcaggatgaacgctggcggcatgcctaagacatgcaagtcgaacgaagtgtcccgttgaagtttggagtgcttgcacaaaaaatggatacggattcgcacttagtggcagacgggtgagtaacacgtgggtaatctacctcggagactgggataactattagaaatgatagctaataccggataattcgtaatcggataactgattatg

SEQ ID NO: 1912 - DNA, 225 bp, Unknown
  Encodes 16S rRNA from Flavobacterium
agagtttgatcatggctcaggatgaacgctagcggcaggcttaacacatgcaagtcgaggggcagcggggcgtagcaatacgccgccggcgaccggcgcacgggtgcgtaacgcgtatgcaacccacccgcaacaggggtataacggagtgaaaattccactaatcccccatatggtttggggaccgcatggtttcctaacgaaagcttatttgtggttgcggac

SEQ ID NO: 1913 - DNA, 225 bp, Unknown
  Encodes 16S rRNA from Pedobacter
agagtttgatcatggctcaggatgaacgctagcggcaggcctaatacatgcaagtcgaacgggaagggtccttcggggccctgagagtggcgcacgggtgcgtaacgcgtatgcaaccaacccctttccgggggacagccggtggaaacgccgggtaataccccatgtcgacgaaggaggacatcctctttcgttgaaagacttcggtcggagagggacgggcat

SEQ ID NO: 1914 - DNA, 225 bp, Unknown
  Encodes 16S rRNA from Clostridium III
agagtttgatcatggctcaggacgaacgctggcggcgtgcctaacacatgcaagtcgaacgagaaatatgacaatgaatccttcgggatgatttggattatggacagtggcggacgggcgagtaacgcgtgagtaacctgcccataagagagggatagccgatggaaacgtcgagtaataccacatattgtagttaattcgcatggattgattatgaaagattta

SEQ ID NO: 1915 - DNA, 225 bp, Unknown
  Encodes 16S rRNA from Selenomonas
agagtttgatcatggctcaggacgaacgctggcggcgtgcttaacacatgcaagtcgaacgagacgattgaaagcttgcttttgaaagtcgagtggcaaacgggtgagtaacgcgtagacaacctgccgcaaagatggggacaacagtccgaaaggactgctaataccgaatgttgtatcgtttccgcatggagatgatattaaagatggcctctacttgtaagc

SEQ ID NO: 1916 - DNA, 225 bp, Unknown
  Encodes 16S rRNA from Rhizobium
agagtttgatcctggctcagaacgaacgctggcggcaggcttaacacatgcaagtcgagcgccccgcaaggggagcggcagacgggtgagtaacgcgtgggaatctaccgtaccctacggaataacgcatggaaacgtgtgctaataccgtatacgccctttgggggaaagatttatcggggtatgatgagcccgcgttggattagctagttggtggggtaaagg

SEQ ID NO: 1917 - DNA, 225 bp, Unknown
  Encodes 16S rRNA from Victivallis
agagtttgatcatggctcagaacgaacgctggcggcatggattaggcatgcaagtcgaacgaagcagcaatgcttagtggcggaagggtgaggaacgcgtgagtaatctgccctcaagttgggaataacaactggaaacggttgctaataccgaatgtggctgcaagaccgcatgattttgcagttaaagatttattgcttgaggatgagctcgcgtcccattag

SEQ ID NO: 1918 - DNA, 225 bp, Unknown
  Encodes 16S rRNA from Butyricimonas
agagtttgatcatggctcaggatgaacgctagcggcaggcttaacacatgcaagtcgaggggcagcgggtctagcaatagatgccggcgaccggcgaaagggtgagtaacgcgtgagcaacatacccttgacagggggataggcactggaaacggtgtgtaataccccgtaacacattccaccgcatgatgggatattgaaagattcattggtcaaggattggct

SEQ ID NO: 1919 - DNA, 225 bp, Unknown
  Encodes 16S rRNA from Parabacteroides
agagtttgatcctggctcaggatgaacgctagcgacaggcttaacacatgcaagtcgaggggcagcgggcgagtggcaacacttgctgtcggcgaccggcgcactggtgagtaacacgtatgcaacctgcccccttctgggagataacccatagaaatgtggcctaatatcccatagtcggcccagccgcatggccgggccgggaaaggcgagccggaaggggat

SEQ ID NO: 1920 - DNA, 225 bp, Unknown
  Encodes 16S rRNA from Adhaeribacter
agagtttgatcatggctcaggatgaacgctagcggcaggcctaatacatgcaagtcgaacggtaaacggtccttcgggactgtgagagtggcggacgggtgcgtaacgcgtatgcaaccaacccccgacgggcggacagccggtggaaacgccggataatacgccatggggcccagggagggcatcctttccgggccaaagcctcggcggtcggggacgggcatg

SEQ ID NO: 1921 - DNA, 225 bp, Unknown
  Encodes 16S rRNA from Eubacterium
agagtttgatcatggctcaggattaacgctggcggcgtgcctaacacatgcaagtcgagcgagaaacagtgaagagattcttcggatgaacagatctgtggacagcggcggacgggtgagtaacgcgtgggcaacctgcccctttccggaggatagccaagggaaactttgaataatactccataaagcatcattgccgcatgacagagatgccaaagatttatc

SEQ ID NO: 1922 - DNA, 225 bp, Unknown
  Encodes 16S rRNA from unknown taxa
agagtttgatcatggctcaggattaacgctggcggcgtgcctaatgcatgcaagtcgaacgtggtctcttcggagattaacgtggcggacgggtgaggaacacgtggggaacctgcccatcggtggggggtagcccgcggaaacgcggggtaattccgcatacggtctcctgggggtagctcaggagaggaaagggtcttcggactcgccgatggaggggcctgc

SEQ ID NO: 1923 - DNA, 225 bp, Unknown
  Encodes 16S rRNA from Treponema
agagtttgatcctggctcagaacgaacgctggcggcgcgttttaagcatgcaagtcgagcgggaatcgggggcaactccgaggagagcggcggacgggtgagtaacacgtggataatctatcttttagactgggatagcctggtgaaagtcaggataataccggataatacgtaatccgcacaagcggagaacgggaaaggagctaaggcttcgcttgaaggtga

SEQ ID NO: 1924 - DNA, 225 bp, Unknown
  Encodes 16S rRNA from Clostridium XlVa
agagtttgatcatggctcaggatgaacgctggcggcgtgcttaatacatgcaagtcgaacggaagatatcgggagcttgctcttgatatctttagtggcggacgggtgagtaacgcgtgggtaacctgcctcatacagggggataacagttagaaatgactgctaaaaccgcatgacatagtcaaaccgcatgatttgactatcaaatatttataggtatgagat

SEQ ID NO: 1925 - DNA, 225 bp, Unknown
  Encodes 16S rRNA from Clostridium XlVa
agagtttgatcctggctcaggacgaacgctggcggcgtgcctaacacatgcaagtcgaacgaggcgaggagtgcttgcacaccgaacctagtggcggacgggtgcgtaacgcgtgggtaacctgccctaaacagggggataacgtatagaaatgtacgctaataccgcataagctcacggaaccgcatggttttgagggaaaaggatttccggtttaggatgggc

SEQ ID NO: 1926 - DNA, 225 bp, Unknown
  Encodes 16S rRNA from Schwartzia
agagtttgatcatggctcaggacgaacgctggcggcgtgcttaacacatgcaagtcgaacggggcgatttgaaagcttgcttttgatgagcctagtggcaaacgggtgagtaacgcgtaggcaacctgccctcaggatggggacaacggcccgaaaggaccgctaataccgaatgacgtatcgggatcgcatgatactgataccaaaggcggagcaatccgtcac

SEQ ID NO: 1927 - DNA, 225 bp, Unknown
  Encodes 16S rRNA from Prevotella
agagtttgatcctggctcaggatgaacgctagctacaggcttaacacatgcaagtcgaggggcagcatgggagttgcttgcaattcccgatggcgaccggcggatgggtgagtaacgcgtatccaacctgtcccgcgcgcggggacagcccttggaaatgaggattaacccccgatacgccatggggccgcatggtcccctggtgaacctttgcgcgggttgggg

SEQ ID NO: 1928 - DNA, 225 bp, Unknown
  Encodes 16S rRNA from Selenomonas
agagtttgatcatggctcagattgaacgctggcggcgtgcttaacacatgcaagtcgaacgagacgatttagaagcttgcttttattgagtcgagtggcaaacgggtgagtaacgcgtagacaacctgccgcaaagatggggacaacagtccgaaaggactgctaataccgaatgttgtatctcctccgcatggaagagatattaaagatggcctctacttgtaa

SEQ ID NO: 1929 - DNA, 225 bp, Unknown
  Encodes 16S rRNA from Beijerinckia
agagtttgatcatggctcagaacgaacgctggcggcaggcttaacacatgcaagttgaacgggatccttaagatagcttgctatattaaggtgagagtagcgcacgggtgagtaacacgtgggaacataccttatagtgtgggataacaattggaaacgattgataataccgcataagccctgagggggaaaggaggaattcgctataagattggcccgcggaag

SEQ ID NO: 1930 - DNA, 225 bp, Unknown
  Encodes 16S rRNA from Eubacterium
agagtttgatcctggctcaggacgaacgctggcggcgtgcttaacacatgcaagtcgaacgaagcttgattgatgattacttcggtatgatttatgatatgactgagtggcggacgggtgagtaacgcgtgagtaacctgcctcttggagggggatagtgtttggaaacgaacagtaataccgcataacgtgcagagaaggcatcttttttgtaccaaagattta

SEQ ID NO: 1931 - DNA, 225 bp, Unknown
  Encodes 16S rRNA from Adhaeribacter
agagtttgatcatggctcaggatgaacgctggcggcaggcttaatacatgcaagtcgaacggtaacgaccggtagcaatactggggcgacgagtggcgcacgggtgcgtaacgcgtatgcaacctgccctcaaccgggacataacgtcgagaaattggcgctaatatcccatgtgtatgcgaggcggcatcgtcttacatataaagattcattggttgaggatgg

SEQ ID NO: 1932 - DNA, 225 bp, Unknown
  Encodes 16S rRNA from unknown taxa
agagtttgatcatggctcagaacgaacgctggtagcgtggattaggcatgcaagtcgaacgggatccgggagatagcaatatttcctggtgagagtggcggaagggcgaggaacacgtgaacaacctgtccatcaggtggggaaaaccgttggaaacgacggctaataccgaatgtggcgtcgtgacacatgtcatgaacgctaaagggggcccgcaagggctct

SEQ ID NO: 1933 - DNA, 225 bp, Unknown
  Encodes 16S rRNA from Desulfobulbus
agagtttgatcctggctcagaacgaacgctggcggcgtgcttaacacatgcaagtcgaacgcgaaagcggcttcggtcgtgagtagagtggcgcacgggtgagtaacgcgtagataacctgtcttcatatctgggataacacgccgaaaggggtactaataccggatatactcgcatttcaataggtgaggcgagaaaaggtggcctctggttcaagctactgta

SEQ ID NO: 1934 - DNA, 225 bp, Unknown
  Encodes 16S rRNA from Bacteroides
agagtttgatcctggctcaggatgaacactagctacaggcttaacacatgcaagtcgaggggcagcattaagtcagcttgctgatttagatggcgaccggcgcacgggtgagtaacgcgtatccaacctgccccctacccggggatagccttgcgaaagtaagattaatacccggtgcagttatgattccgcatgggaatataacgaaagattcatcggtggggg

SEQ ID NO: 1935 - DNA, 225 bp, Unknown; identical to SEQ ID NO: 742
  Encodes 16S rRNA from Rummeliibacillus

SEQ ID NO: 1936 - DNA, 224 bp, Unknown
  Encodes 16S rRNA from Agarivorans
agagtttgatcatggctcagattgaacgctggcggcaggcttaacacatgcaagtcattgcacaatgggggaaaccctgatgcagccatgccgcgtgtgtgaagaaggccttcgggttgtaaagcacttttgcattcgaggaagacagcgtataaataaatgcgctatttgacgttagagtgtgaataagcaccggcaaactccgtgccagcagccgcggtaat

SEQ ID NO: 1937 - DNA, 225 bp, Unknown
  Encodes 16S rRNA from Clostridium XlVa
agagtttgatcctggctcaggatgaacgctggcggcgtgcctaacacatgcaagtcgaacggagatttggcgctgacgagtgaagtagcttgctatggaacaaatcttgccaaagcttagtggcggacgggtgagtaacgcgtggacaacctggcccatacagggggacagcagctggaaacggctgataataccgcataagcgcacagtatcacatggtacagt

SEQ ID NO: 1938 - DNA, 225 bp, Unknown
  Encodes 16S rRNA from Selenomonas
agagtttgatcctggctcaggacgaacgctggcggcgtgcttaacacatgcaagtcgaacggggctattagaagcttgcttttaagagcctagtggcaaacgggtgagtaacgcgtaggcaacctgcctctaagatggggacaacagtccgaaaggactgctaataccgaatgacgtaagtatctcgcatgggaaacttaccaaagatggcctctgcttgtaagc

SEQ ID NO: 1939 - DNA, 225 bp, Unknown
  Encodes 16S rRNA from unknown taxa
agagtttgatcctggctcagaacgaacgctggtagcgtggattaggcatgcaagtcgaacgggatcaggaaggcagcaatgtcggcctgtgagagtggcggaagggcgaggaacacgtgagcaacctgtccttgaggtggggaaaactccgggaaactggagctaataccgaatgtggcgccgggagacatcttccgagcgctaaagggggccgaaaggctctcc

SEQ ID NO: 1940 - DNA, 225 bp, Unknown
  Encodes 16S rRNA from Prevotella
agagtttgatcctggctcaggatgaacgctagcggcaggcttaacacatgcaagtcgaggggcagcgggtccagcaatggatgccggcgaccggcgaaagggtgagtaacgcgtgagcaacgtgcccgtctgagggggatagtcattggaaacgatgcgtaataccccgtaacaacatttaccgcatggtgggtgtttgaaagatttattgcagacggatcggct

SEQ ID NO: 1941 - DNA, 225 bp, Unknown
  Encodes 16S rRNA from Spirochaeta
agagtttgatcctggctcagaacgaacgctggcggcgcgttttaagcatgcaagtcgagcggtaagccggagcaatccggtgtagagcggcggacgggtgagtaacacgtggataatctggcctttagttcgggatagcctggtgaaagtcaggataataccggatacgacgcttatggcacaagcgataagcgggaaaggagccaaggctttgctgaaggatga

SEQ ID NO: 1942 - DNA, 225 bp, Unknown
  Encodes 16S rRNA from Selenomonas
agagtttgatcatggctcaggacgaacgctggcggcgtgcttaacacatgcaagtcgaacggggcgattagaagcttgcttttatgagcctagtggcaaacgggtgagtaacgcgtaggcaacctgcctctaagatggggacaacagtccgaaaggactgctaataccgaatgttgtaagtaactcgcatgagagacttaccaaagatggcctctacttgtaagc

SEQ ID NO: 1943 - DNA, 225 bp, Unknown
  Encodes 16S rRNA from Spiroplasma
agagtttgatcctggctcaggatgaacgctggcggcatgcctaagacatgcaagtcgaacgaggtggcccattgaaggtggagtgcttgcacgaagctggatatggattcccacctagtggcagacgggtgagtaacacgtgggttacctacctctttgttggggataacagttggaaacgattgctaataccgaataagatactcgtattgaaaggagctttca

SEQ ID NO: 1944 - DNA, 225 bp, Unknown
  Encodes 16S rRNA from Pedobacter
agagtttgatcatggctcaggatgaacgctagcggcaggcctaatacatgcaagtcgtacgggagtcccccttcggggggatgagagtggcggacgggtgcgtaacgcgtatgcaacccacccctgtcagccggatagccttgggaaaccgggggtaacacggcatgttcccgcgtgggggcatccccatacgggcaaagcggcgacgcggacggggacgggcat

SEQ ID NO: 1945 - DNA, 225 bp, Unknown
  Encodes 16S rRNA from Clostridium XlVa
agagtttgatcctggctcaggatgaacgctggcggcgtgcttaatacatgcaagtcgaacgaagcactttccccggactttttcggaacgaagggggttgtgacttagtggcggacgggtgagtaacgcgtggataacctgccccatgcagggggacaacagctggaaacggctgctaataccgcataagcgcacagtgaggcatctcacggtgtgaaaagattt

SEQ ID NO: 1946 - DNA, 225 bp, Unknown
  Encodes 16S rRNA from unknown taxa
agagtttgatcatggctcaggacgaacgctggcggcgtgcttcatacatgcaagtcgaacgagaaattgccttcgggcaatggacagtggcggacgggtgagtaatgtgtagagaatctgccctatagtgggggatagcagttggaaacgactattaataccccatatgcgcgtagttgcgatactattcgtgaaagatttatcgctataggatgagtctgcatc

SEQ ID NO: 1947 - DNA, 225 bp, Unknown
  Encodes 16S rRNA from Lactobacillus
agagtttgatcctggctcaggacgaacgctggcggcgtgcctaatacatgcaagtcgaacgcaatcttttaacaatgagtgcttgcactcagcgttttaagtgcgagtggcgaacgggtgagtaacacgtgggcaatctgcccaaaagagggggataacacttggaaacaggtgctaataccgcataaaccaactgatcgcatgatcggttgggcaaagatggtg

SEQ ID NO: 1948 - DNA, 225 bp, Unknown
  Encodes 16S rRNA from Clostridium XlVa
agagtttgatcatggctcaggatgaacgctggcggcgtgcctaacacatgcaagtcgaacggggtacagacgctgtgcggagaagtgcttgcacggaaccaaacttgtttgtacttagtggcggacgggtgagtaacgcgtggagaacctgcctcacacagggggataacagggagaaattcctgctaataccgcataagcgcacgacatggcatcatgaagtgt

SEQ ID NO: 1949 - DNA, 225 bp, Unknown
  Encodes 16S rRNA from Prevotella
agagtttgatcatggctcaggatgaacgctggcggcgtgcctaacacatgcaagtcgaggggcagcatgtaggttgcttgcaacctatgatggcgaccggcgcacgggtgcgtaacgcgtatccaaccttccccgcagtagggtgcagcccgttgaaagacggattaatcccctatgttgtccattgacggcatccgatttggacgaaagatttcatcgctgcgg

SEQ ID NO: 1950 - DNA, 225 bp, Unknown
  Encodes 16S rRNA from Prevotella
agagtttgatcctggctcaggatgaacgctagcgacaggcttaacacatgcaagtcgaggggtaacatgaagaaagcttgctttctttgatgacgaccggcgcacgggtgagtatcgcgtatccaacctgcccataagtagggaatagccttgcgaaagtaagattaatgccctatggtttccgccaaagacatctgagatggaataaagatttatcgcttatgg

SEQ ID NO: 1951 - DNA, 154 bp, Unknown
  Encodes 16S rRNA from Marinobacter
agagtttgatcctggctcagattgaacgctggcggcaggcttaacacatgcaagtcgtacggtaacagaggaagacagcgtataaataaatgcgctatttgacgttagagtgtgaataagcaccggcaaactccgtgccagcagccgcggtaat

SEQ ID NO: 1952 - DNA, 225 bp, Unknown
  Encodes 16S rRNA from Butyricimonas
agagtttgatcctggctcaggatgaacgctagcggcaggcttaacacatgcaagtcgaggggcatcgcggagtagcaatactctggcggcgaccggcggaagggtgcgtaacgcgtgagcaacttgcccgtcactgtgggataggcactggaaacggtgtgtaataccacgtaacacagcggtccgcatggacggttgttgaaagatccgttggtgacggatagg

SEQ ID NO: 1953 - DNA, 225 bp, Unknown
  Encodes 16S rRNA from Prevotella
agagtttgatcatggctcaggatgaacgctagcggcaggcctaacacatgcaagtcgaggggcagcggggtagcaataccgccggcgaccggcgcacgggtgagtaacgcgtatgtaacctagttcacaaagagggatagccttccgaaagggagattaataccacatatgatgatagcttcgcatggagcagtcatgaaaaatttattgatgtgaaatggacat

SEQ ID NO: 1954 - DNA, 225 bp, Unknown
  Encodes 16S rRNA from Dongia
agagtttgatcctggctcagaacgaacgctggcggcacgcttaacacatgcaagtcggacgggtggaagttagtttactgatggaagctagtggcggactggtgagtataatacaggaatatgcccttaggtatgggatagctttgggaaactggaggtaataccgtatgaggtcgagagaggaaagcaggaatgcgcctgaggattagcctgtatctgattagg

SEQ ID NO: 1955 - DNA, 225 bp, Unknown
  Encodes 16S rRNA from Anaerovorax
agagtttgatcatggctcaggatgaacgctggcggcgtgcctaacacatgcaagtcgagcgggattcttacgaatggagattcgtcgaagtaagtaagatgatagcggcggacgggtgagtaacgcgtaggtaacctacccccggctgcgggatagcctagggaaacctggattaataccgcatgatgcgttgaagtcacatggctttaacgccaaagatttatc

SEQ ID NO: 1956 - DNA, 225 bp, Unknown
  Encodes 16S rRNA from Butyricimonas
agagtttgatcctggctcaggatgaacgctagcggcaggcttaacacatgcaagtcgaggggcagcgcggagtagcaatactctggcggcgaccggcggaagggtgcgtaacgcgtgagcaacttgcccgtcactgtgggataggcactggaaacggtgtgtaataccacgtaacacatttgctcgcatgggtagatgttgaaaggtttaccggtgacggatggg

SEQ ID NO: 1957 - DNA, 225 bp, Unknown
  Encodes 16S rRNA from Cryptanaerobacter
agagtttgatcatggctcaggacgaacgctggcggcatgcctaacacatgcaagtcgaacggaataagaatggctgtagcgatactttcgttcttatttagtggcgaacgggtgagtaacacgtgagcaacctgccttctacacagggataacagttggaaacgactgctaataccggataagaccacactgaggcatctcagaggggtcaaagcgcttagcggt

SEQ ID NO: 1958 - DNA, 225 bp, Unknown
  Encodes 16S rRNA from Papillibacter
agagtttgatcatggctcaggatgaacgctggcggcgtgcataacacattcaagtcgaacgaagcacagttgatgaagtcttcggatggaattggctatgacttagtggcggacgggtgagtaacgcgtgagcaaccttcctggtagtgagggataacacagggaaacttgtgctaataccgcatgacgcatagacatcgcatggtgactatgccaaagacaagt

SEQ ID NO: 1959 - DNA, 225 bp, Unknown
  Encodes 16S rRNA from Clostridium sensu stricto
agagtttgatcatggctcaggacgaacgctggcggtgtgcttaatacatgcaagtcgagcggacttgcgggggcttgctcccgcaagttagcggcggacgggtgagtaacgcgcgagcaacctgcctatatctggggaataacacagagaaatttgtgctaataccgcataagaccacagtggggcatcccacaggggtaaaagatttatcggatatagatgggc

SEQ ID NO: 1960 - DNA, 225 bp, Unknown
  Encodes 16S rRNA from Escherichia/Shigella
agagtttgatcctggctcagattgaacgctggcggcaggcctaacacatgcaagtcgaacggtaacaggaaacagcttgctgtttcgctgacgagtggcggacgggtgagtaatgtctgggaaactgcctgatggagggggataactactggaaacggtagctaataccgcataacgtcgcaagaccaaagagggggaccctcgggcctcttgccatcggatgtg

SEQ ID NO: 1961 - DNA, 225 bp, Unknown
  Encodes 16S rRNA from Butyricicoccus
agagtttgatcatggctcaggataaacgctggcggcgcacataagacatgcaagtcgaacggaagccgtgcgagagacaattgaagatttatctgattgagtctcacgcacaatgactttagtggcggactggtgagtaacacgtaagcaatctgcctatcagaggggaataacagtgagaaatcattgctaataccgcatatgctcacagcatcgcatgatgca

SEQ ID NO: 1962 - DNA, 225 bp, Unknown
  Encodes 16S rRNA from Prevotella
agagtttgatcatggctcaggatgaacgctagctacaggcttaacacatgcaagtcgaggggcagcatggttgttgcttgcaacaactgatggcgaccggcgcacgggtgagtaacgcgtatccaaccttcccccaagtagggaatagcccggcgaaagtcggattaatgccctatgttttccttggatggcatctgatgaggaacaaagacttgtcgcttgggg

SEQ ID NO: 1963 - DNA, 225 bp, Unknown
  Encodes 16S rRNA from Lachnospiracea incertae sedis
agagtttgatcctggctcaggatgaacgctggcggcgtgcttaacacatgcaagtcgaacggggaaacatatttgaagatttcggttggaagatatgttttctagtggcggacgggtgagtaacgcgtaaacaatctgccttagagagggggataacagatagaaatatttgctaataccgcataagaccacagctaggcatctagcaggggtaaaaggaggaat

SEQ ID NO: 1964 - DNA, 225 bp, Unknown
  Encodes 16S rRNA from Thermotalea
agagtttgatcctggctcaggatgaacgctggcggcgtgcctaacacatgcaagtcgagcgagaagcttcggagtagattcttcggatgacacactgaagtggacagcggcggacgggtgagtaacgcgtgggcaacctgcccctttccggaggatagccaagggaaactttgaataatactccataaagcagtgacatcacatggtgatactgccaaagattta

SEQ ID NO: 1965 - DNA, 225 bp, Unknown
  Encodes 16S rRNA from Cohaesibacter
agagtttgatcatggctcagaacgaacgctggcggcaggcttaacacatgcaagtcgaacggaacataggtagcttgctatctatgtcagtggcgcacgggtgagtaacgcgtaggaacctgtcttttagcctgggatagcctctggaaacggagggtaaaaccggatgagccctgagggggaaatgagtaatcagctggaagaggggcctgcgttagattaggc

SEQ ID NO: 1966 - DNA, 225 bp, Unknown
  Encodes 16S rRNA from Clostridium XVIII
agagtttgatcatggctcaggatgaacgctggcggcgtgcctaatacatgcaagtcgaacgaggattcattgatggagcttgctccggatttgaattcgagtggcgaacgggtgagtaatacatgaataatctaccccttagtctgggataccaatctgaaaagattgctaataccggataggcaattctggggcatctcggaattattaaagatgggtttccat

SEQ ID NO: 1967 - DNA, 225 bp, Unknown
  Encodes 16S rRNA from Lachnospiracea incertae sedis
agagtttgatcctggctcaggatgaacgctggcggcgtgcttaacacatgcaagtcgaacggacttttctcgctgaaaaaggaaggtgcttgcaccggagagtttcttgagggaagttagtggcggacgggtgagtaacgcgtgggtaacctgcctatcacagggggataacagttggaaacgactgctaataccgcataagcgcacggtatcgcatgatacagt

SEQ ID NO: 1968 - DNA, 225 bp, Unknown
  Encodes 16S rRNA from Spirochaeta
agagtttgatcatggctcagaacgaacgctggcggcgcgtcttaagcatgcaagtcgggcggcaagctgccttcgggcagcctagagcggcggactggtgagtaacgcgtgggtgacgcacccccttgacggggacagcccgcagaaatgcggggtaataccggataaggtcctcggggttggagcccggggaggaaaggagctattgctccgcgaggggagcgg

SEQ ID NO: 1969 - DNA, 225 bp, Unknown
  Encodes 16S rRNA from Clostridium XlVa
agagtttgatcctggctcaggatgaacgctggcggcgtgcttaacacatgcaagtcgaacgaagcactaaggatgagaccttcgggtggaattcttagtgacttagtggcggacgggtgagtaacgcgtgggtaacctgccccatacagggggataacagttggaaacgactgctaagaccgcataacaagggagtaccgcatgacacttccttcaaagatttat

SEQ ID NO: 1970 - DNA, 225 bp, Unknown
  Encodes 16S rRNA from Hydrogenoanaerobacterium
agagtttgatcatggctcaggagaaacgctggcggcgcacataagacatgcaagtcgaacggaatttagccgaatgtttacatgaggcgaagatttagtggcggacgggtgagtaacacgtgagcaacctgcctttaggagggggataacattgagaaatcagtgctaataccgcataatgcataagcttcgcatgaagcctatgccaaaggagtaatccaccta

SEQ ID NO: 1971 - DNA, 225 bp, Unknown
  Encodes 16S rRNA from Clostridium IV
agagtttgatcctggctcaggacgaacgctggcggcgtgcctaacacatgcaagtcgaacggagatattttgaatgaagacttcggttggatttcgatttatcttagtggcggacgggtgagtaacgcgtgagtaacctgcctttttgagggggataacatcgggaaatcgatgctaataccgcataatattcaagattcgcatggattttgaatcaaaggagca

SEQ ID NO: 1972 - DNA, 225 bp, Unknown
  Encodes 16S rRNA from Papillibacter
agagtttgatcctggctcaggatgaacgctggcggcgtgcataacacattcaagtcgaacgaagcactttgacggaagtcttcggacggaagttgatttgacttagtggcggacgggtgagtaacgcgtgagcaaccttcctggtagtgagggataacacagggaaacttgtgctaataccgcatgacgcatggatatcgcatggtatatatgccaaagacttgt

SEQ ID NO: 1973 - DNA, 225 bp, Unknown
  Encodes 16S rRNA from Sporosarcina
agagtttgatcatggctcaggatgaacgctggcggcatgcctaagacatgcaagtcgtacgaagcggcccactgacttatattgatacattgagagcttgctcgatttgaggatttataatgacgtggattttccgcttagtggcaaacgggtgagtaacacgtgggttacctgcctctatgttggggataccaattggaaacgattgttaataccgaatatgat

SEQ ID NO: 1974 - DNA, 225 bp, Unknown
  Encodes 16S rRNA from Selenomonas
agagtttgatcctggctcaggacgaacgctggcggcgtgcttaacacatgcaagtcgaacgagacgattgaaagcttgcttttgaaagtcgagtggcaaacgggtgagtaacgcgtagacaacctgccgcaaagatggggacaacagtccgaaaggactgctaataccgaatgttgtcatttctcccgcatgggagactgattaaagatggcctctacttgtaag

SEQ ID NO: 1975 - DNA, 225 bp, Unknown
  Encodes 16S rRNA from Papillibacter
agagtttgatcatggctcaggataaacgctggcggcgcacataagacatgcaagtcgaacggaccaaattagtttgtttacaaattgaagaggttagtggcggactggtgagtaatatgtaagcaatctgcctgttagagtggaacaacagtgagaaatcactgctaataccgcatatgccatagatgtcacatgacaacagtgggaaaggagcaatccgctaac

SEQ ID NO: 1976 - DNA, 187 bp, Unknown
  Encodes 16S rRNA from Lachnospiracea incertae sedis
agagtttgatcatggctcaggataaacgctggcggcgtgcttaattggacaatgggggaaaccctgatccagcgacgccgcgtgaacgaagaagtatctcggtatgtaaagttctatcagcagggaagataatgacggtacctgactaagaagcaccggctaaatacgtgccagcagccgcggtaat

SEQ ID NO: 1977 - DNA, 225 bp, Unknown
  Encodes 16S rRNA from Clostridium XlVa
agagtttgatcctggctcaggatgaacgctggcggcgtgcttaacacatgcaagtcgaacgaggtatagaagagaagttttcggatggatcttttataccgagtggcggacgggtgagtaacgcgtggagaacctgccccatacagggggataccaattagaaatgattgttaataccgcataagcgcacactgaggcatctcagagtgtgaaaagctccggcgg

SEQ ID NO: 1978 - DNA, 225 bp, Unknown
  Encodes 16S rRNA from Saccharofermentans
agagtttgatcatggctcaggacgaacgctggcggcgtgcctaacacatgcaagtcgagcgaggacaacggcttcggctgttgttcgagcggcggacgggtgagtaacgcgtgaacaatctgtccctgacagggggataacacttggaaacaggtgctaataccgcataagaccacgtgaccgcatggtcgaggggtcaaaggagcaatccggtgaggggtgagt

SEQ ID NO: 1979 - DNA, 225 bp, Unknown
  Encodes 16S rRNA from Clostridium IV
agagtttgatcatggctcaggacgaacgctggcggcgtgcctaacacatgcaagtcgaacggagttaaacgctgaatggatggtagcttgctactggaaattcttgtttaacttagtggcggacgggtgagtaacgcgtgagcaacctgcctttcagagggggataacggctggaaacggtcgctaataccgcataacgtatatttaaggcatcttagatatacc

SEQ ID NO: 1980 - DNA, 225 bp, Unknown
  Encodes 16S rRNA from Lachnospiracea incertae sedis
agagtttgatcctggctcaggatgaacgctggcggcgtgcttaatacatgcaagtcgaacgaagcatgttgacggaatcccctcggggaggaagatgacatgacttagtggcggacgggtgagtaacgcgtgggcaatctgccctgtacagggggacaacagttggaaacgactgctaataccgcataagcgcacgatgaccgcatggtcaggtgtgaaaaggag

SEQ ID NO: 1981 - DNA, 225 bp, Unknown
  Encodes 16S rRNA from Clostridium IV
agagtttgatcctggctcaggagaaacgctggcggcgcacataagacatgcaagtcgaacggaacttagtcgaatgtttacatgagacaaaagtttagtggcggacgggtgagtaacacgtgagcaacctgcctttaagagggggataacattgagaaatcagtgctaataccgcataacgcatttctaccgcatgatagaaatagccaaaggagaaatccgctt

SEQ ID NO: 1982 - DNA, 225 bp, Unknown
  Encodes 16S rRNA from Lachnospiracea incertae sedis
agagtttgatcatggctcaggatgaacgctggcggcgtgcctaacacatgcaagtcgaacggggtgtcagctcttcggaacggacacttagtggcggacgggtgagtaacgcgtgggtaacctgcctcatacagggggatagcagttggaaacgactgataataccgcataagcgcacagtatcgcatggtacagtgtgaaaaactccggtggtatgagatggac

SEQ ID NO: 1983 - DNA, 225 bp, Unknown
  Encodes 16S rRNA from Desulfotomaculum
agagtttgatcatggctcaggactaacgctggcggcgtgcctaacacatgcaagtcgaacgattcattttttgtagcaatatagaagatggagagtggcgcacgggtgagtaacacatagatgatctgcctttcagactgggacaactcagggaaacttgagctaataccagataagaccccatgaagggattcacgtgatcaaagggggagcaatctcctgctg

SEQ ID NO: 1984 - DNA, 225 bp, Unknown
  Encodes 16S rRNA from Pedobacter
agagtttgatcatggctcaggatgaacgctagcggcaggcctaatacatgcaagtcgaacgggaagggtccttcggggccctgagagtggcgcacgggtgcgtaacgcgtatgcaaccaacccctttccgggggacagccggtggaaacgccgggtaataccccatgtcgatccatttgggcatccaagaggattgaaagatttcggtcggagagggacgggcat

SEQ ID NO: 1985 - DNA, 225 bp, Unknown
  Encodes 16S rRNA from Anaeroplasma
agagtttgatcatggctcaggattaacgctggcggcgtgcctaatacatgcaagtcgaatggttagcttgctaaccatggcgaacgggtgagtaacacgtaggcaacctgacgtaaagccgaggataaccattggaaacgatggataatactggataggacatttggaggcatctttggatgtttaaagatttatcactttacgaggggcctgcggcgcattagc

SEQ ID NO: 1986 - DNA, 225 bp, Unknown
  Encodes 16S rRNA from Clostridium IV
agagtttgatcctggctcaggacgaacgctggcggcgtgcttaacacatgcaagtcgaacgagaatccgtggaaagagatttcggtcaatggaagcggaggaaagtggcggacgggtgagtaacgcgtgaggaacctgccttggagagggggacaacagccggaaacggctgctaataccgcatgacgcacagaggggacatccccattgtgccaaagatttatc

SEQ ID NO: 1987 - DNA, 225 bp, Unknown
  Encodes 16S rRNA from Treponema
agagtttgatcatggctcagaacgaacgctggcggcgcgtcttaagcatgcaagtcgggcgggattcatgtgcttgcacatgatgagagcggcggactggcgaggagcgcgtgggtgacgcacccctcggacggggacagccggcagaaatgccgggtgataccggatgaggtcccccttgtcggaggagggggaggaaaggggcttcggccccgccgggggagc

SEQ ID NO: 1988 - DNA, 225 bp, Unknown
  Encodes 16S rRNA from Mogibacterium
agagtttgatcctggctcaggatgaacgctggcggcgtgcctaatacatgcaagtcgagcgagatactttcaaatgagacttcggtggattttggaggttgaaagcggcggacgggtgagtaacgcgtaggcaacctgccctttgcacagggatagccattggaaacgatgattaatacctgataacgcgggagcgatgcatatcgcttccgtcaaagattcatc

SEQ ID NO: 1989 - DNA, 225 bp, Unknown
  ITS sequence of Candida pararugos
tcctccgcttattgatatgcttaagttcagcgggtgatcttacttgatatgaggtcaaaatttgataattttccacagcttgtgtctaacaactgtgtataatctttttcagtccatatagtgaaccattacccactaatatatatgtggagaaaaaatgacgctcacacaagtatacctccaaagaggtgcaatgtgcgttcaaaaactcaatgattcacgtct

SEQ ID NO: 1990 - DNA, 225 bp, Unknown
  ITS sequence of Dipodascaceae s
tcctccgcttattgatatgcttaagttcagcgggtaatcctacttgatctgaggttgaatagtgttgtttttcaaacgaatttgattcgaaattttagaagagcaaagcaattccaagagagaaacaacgctcaaacaagtatactttgggggataccccaaagtgcaatgtgcgttcaaaaactgatgattcacttctgcaattcacaagaaatatcgcgtttc

SEQ ID NO: 1991 - DNA, 225 bp, Unknown
  ITS sequence of Orpinomyces sp AF CTS CHO
tcctccgcttattgatatgcttaagttcagcgggtactcttatctgatttgagatcaagttatttttaaattaaattttccttttaaattaagcaacaattaatattttaatttttaccctttaaaactgaaaagtttattcctttttacgggaaaattttatccaattttattagataaaaaccaaaaaaaattggcttttaaaaatcaatttaaagtgaaaca

SEQ ID NO: 1992 - DNA, 225 bp, Unknown
  ITS sequence of Candida catenulat
tcctccgcttattgatatgcttaagttcagcgggtagtcttacgtgtgtgagggaaaaagtatggttgtgagtaaactgtaatactacaccaatcactttttggaggaacagctgacgccgtatgtccattacctgcgagggagataaccgctcacacacgcatgcccgcgggaatacccacgggcgcaatgtgcgttcaaagattcgatgattcacaaaatctg

SEQ ID NO: 1993 - DNA, 225 bp, Unknown
  ITS sequence of Aspergillus cibariu
tcctccgcttattgatatgcttaagttcagcgggtatccctacctgatccgaggtcaacctggttaaaaagattggttgcgaggctagctgccagctggacctacgggagcgggtgacaaagccccatacgctcgaggaccagacatggtgccgccactgccttttgggcccgtccccgttgccagggacggaagcccaacacacaagccgtgcttgagggcagc

SEQ ID NO: 1994 - DNA, 225 bp, Unknown
  ITS sequence of Candida etchellsi
tcctccgcttattgatatgcttaagttcggcgggtaatcttgcttgattgggggccataaaaaatattactgcacagagttattaacgtgtgctgttccatttctttgactccaataaggagcaacacctcgtaatccacaagaagtagattagagagaaagttcggcgctccaacaagcatgctactaggagatcctagaagcgcaatgtgcgttcaaagattc

SEQ ID NO: 1995 - DNA, 225 bp, Unknown
  ITS sequence of Anaeromyces sp K
tcctccgcttattgatatgcttaagttcagcgggtactcttatctgatttgagatcaagttgttttaaaaaatttcctttttgttttgaatatgaaaaggtatttttaaaattgtctaggttattccttggaaaaggaaaattttatccaattttaaaaattgaaattttcaaatccaatttaaaaattcaatttaaagtgaaacaacttgtatcgttgtaaaac

SEQ ID NO: 1996 - DNA, 225 bp, Unknown
  ITS sequence of Cladosporium sp 4 MU 201
tcctccgcttattgatatgcttaagttcagcgggtatccctacctgatccgaggtcaaccttagaaatggggttgttttacggcgtagcctcccgaacaccctttagcgaatagtttccacaacgcttaggggacagaagacccagccggtcgatttgaggcacgcggcggaccgcgttgcccaataccaagcgaggcttgagtggtgaaatgacgctcgaacag

SEQ ID NO: 1997 - DNA, 225 bp, Unknown
  ITS sequence of Wallemia seb
tcctccgcttattgatatgcttaagttcagcgggtaatcccatctgatttgaggtcgatttgatcaggttgtttgccaaaaattggcagttagaagcaatcactacaaattactaaggcgagattactctctgactggtgatggatgtaatccattataacacacagtattaacccattcataaggtcatcactaatcattttaaagggagtcattatacatgac

SEQ ID NO: 1998 - DNA, 225 bp, Unknown
  ITS sequence of Orpinomyces sp AF CTS CHO
tcctccgcttattgatatgcttaagttcagcgggtactcttatctgatttgagatcaagttatttgaaataaatttccttttgctattgaatttttaatttcagattaaaaaattgtcaagtttattccttttttacgggaaaattttatccaattttttaaaaattgaaaataaaaaaacaattttaaaattcaatttaaagtgaaacaacttgtatcgttgta

SEQ ID NO: 1999 - DNA, 225 bp, Unknown
  ITS sequence of Orpinomyces sp AF CTS CHO
tcctccgcttattgatatgcttaagttcagcgggtactcttatctgatttgagatcaagttatttaaaataaatttccttttcttgaaaaatttattttcgctttttaaaactgtcaaggttattcctttttacgggaaaattttatccaattttaaaaaattgaaaataaaattttacaatttaaaaattcaatttaaagtgaaacaacttgtatcgttgtaaa

SEQ ID NO: 2000 - DNA, 225 bp, Unknown
  ITS sequence of Kodamaea ohmer
tcctccgcttattgatatgcttaagttcagcgggtagtcctacttgatttgaggaaaaaaaatgagtgtactgacggtaccgttttgtagagtactgtcgtcattattttcgtgcaaacacaatacaatccgtgaggattagggaagtattcgctcaaacaagcataccattgggaatacccaatggtgcaatgtgcgttcaaagattcgatgattccgagagct

SEQ ID NO: 2001 - DNA, 225 bp, Unknown
  ITS sequence of Pichia burtoni
tcctccgcttattgatatgcttaagttcagcgggtagtcctacctgatttgaggaaaatgtgtttttagtgtggttgtcactactaaattagaaaataacaacacaagaaaaatacttttcgaatggactgactaagagctcgtgccattcaacgccaacccgcgggggttgagggagaaatgacgctcaaacaggcataccttgtggaataccacaaggtgcaa

SEQ ID NO: 2002 - DNA, 225 bp, Unknown
  ITS sequence of Pachyphloeus carneu
tcctccgcttattgatatgcttaagttaagggagtcctcttacaagtttcaagtctttcttaaaatacagtttataatattttccttttataatttaaaaatgttactttttaatttattaaagtacttatattactttctgttttttggattttacttttgtaaaatctttctttttattttatattattttttaagggacgttgaaacttatatacatcgatc

SEQ ID NO: 2003 - DNA, 225 bp, Unknown
  ITS sequence of Anaeromyces sp FFEX
tcctccgcttattgatatgcttaagttcagcgggtactcttatctgatttgagatcaagttatttgaaataaatttccttttgctattggattttattctctttcaaaaaattgtcaaggttattccttttttacgggaaaattttatccaattttttaaaaattgaaaataaaaaacaattttaaaattcaatttaaagtgaaacaacttgtatcgttgtaaaa

SEQ ID NO: 2004 - DNA, 225 bp, Unknown
  ITS sequence of Trichosporon asteroide
tcctccgcttattgatatgcttaagttcagcgggtagtcctacctgatttcaggccagagtcaaagtaattgtccttgcggacgattagaagcacgcttcaacacaatggacccagtgaaacttattacaccagacattaatgtcaaacttgctaactcttttaaggcgagcgatcagagatcgcagacgcccaaatccaatccattaggaaaccctagtggttg

SEQ ID NO: 2005 - DNA, 225 bp, Unknown
  ITS sequence of Rhizophydium sp MP 00
tcctccgcttattgatatgcttaagttaagagagtcatcttaaaaatttcaaatctttttttaacttttgaatttacttttgattttactcttaataaattcttttttataatcaattgttttaattgatttattataatttattttattttaaaaagaggatattgaaacttttatatttaattaaagctaattaaatactttcatgcattcaaatatttactt

SEQ ID NO: 2006 - DNA, 225 bp, Unknown
  ITS sequence of Vrystaatia aloeicol
tcctccgcttattgatatgcttaagttaagagagtcatcttgaaaatttcaaatcttttttaaatcgtttgaccttttcattttttacgtgattagatcaattcttattcaattaatcaattgctttaattgatttattaaatatgttattttaaaattgggatgttgaaactttcatatttaattgaagttcaattaaatactttcatgcattcaaatatttac

SEQ ID NO: 2007 - DNA, 225 bp, Unknown
  ITS sequence of Rhizophydium sp MP 00
tcctccgcttattgatatgcttaagttaagagagtcatcttaaaaatttcaaatctttttttaacttttgaatttacttttttgattttactcttaaaaaataaattcttttattttataatcaattgttttaattgatttattataatttattttattttaaaaagaggatattgaaacttttatatttaattaaagctaattaaatactttcatgcattcaaa

SEQ ID NO: 2008 - DNA, 225 bp, Unknown
  ITS sequence of Ascomycota s
tcctccgcttattgatatgcttaagttcagcgggtatccctacctgatccgaggtcaacctggaaaaaatggttggaaaacgtcggcaggcgccggccaatcctacagagcatgtgacaaagccccatacgctcgaggatcggacgcggtgccgccgctgcctttcgggcccgtccccccggagagggggacggcgacccaacacacaagccgggcttgagggca

SEQ ID NO: 2009 - DNA, 225 bp, Unknown
  ITS sequence of Wallemia seb
tcctccgcttattgatatgcttaagttcagcgggtaatcccatctgatttgaggtcgatttgatcagtttgtttgccaatggcagttagaagcaatcactacaaattactaaggcgagattactctctgactggtgatggatgtaatccattataacacacagtattaacccattcataaggtcatcactaattattttaaagggagtcattgtttatatgacaa

SEQ ID NO: 2010 - DNA, 225 bp, Unknown
  ITS sequence of Vrystaatia aloeicol
tcctccgcttattgatatgctcctctaccttgacatccgctaccttgataattttgctgttgttgtcttcttctatcttcttcttgtctacgtctatcttcttctcttctacgtctatcttcttcttctcttcttcgtctttcatcctcttgtcttcttctatcttgttcttgtctacgtctatcttcttcttgatgtcttctatcttcttctcggtgtcttcta

SEQ ID NO: 2011 - DNA, 225 bp, Unknown
  ITS sequence of Trichoderma virid
tcctccgcttattgatatgcttaaattcagcgggttcaacttattggaatcagagtaaatcgaggctgtcgttgatcttaattaggttccacgaaccgcttgcaccacaagattatcttgagcacttcatttattgtgtaattacatctactgaaatcaataacacgctcattgaggtgttttacatgtgttcagatgtgttcaaatgtcaatctaatgattgac

SEQ ID NO: 2012 - DNA, 225 bp, Unknown
  ITS sequence of Anaeromyces sp FFEX
tcctccgcttattgatatgcttaagttcagcgggtactcttatctgatttgagatcaagttatttaaataaatttccttttaataattggaattttttaatttcaattaatttaaaattgtcaaggttattcctttttacgggaaaattttatccaattttaaaaattgaattaaaaaaatacaatttaaaaattcaatttaaagtgaaacaacttgtatcgttg

SEQ ID NO: 2013 - DNA, 225 bp, Unknown
  ITS sequence of Anaeromyces sp FFEX
tcctccgcttattgatatgcttaagttcagcgggtactcttatctgatttgagatcaagttatttttaaataaatttccttttgctattgaattcttaatttcagcttaaaaaattgtcaaggttattcctttttacaggaaaattttatccaattttttaaaaattgaaaataaaaaaacaattttaaaattcaatttaaagtgaaacaacttgtatcgttgta

SEQ ID NO: 2014 - DNA, 225 bp, Unknown
  ITS sequence of Vrystaatia aloeicol
tcctccgcttattgatatgctcatgatattcctctttggaaatgctgccgttgcatggagcgtaacataagtcaatctggctgttcaagcatggaccatccattcttttgcaggttcttattctaaacaattgctttaggaacttaacggtttggcgaacagcagtaacatctgtaaaaggaccatagtatgaaccttttttgcctatatcccttgttacgactt

SEQ ID NO: 2015 - DNA, 225 bp, Unknown
  ITS sequence of Orpinomyces sp AF CTS CHO
tcctccgcttattgatatgcttaagttaagagagtcatcttaaaaatttcaaatcaaatttaaatatattaagttaatttttaaaaaatgttattttaaaattaactcgtttattatttaattaattgttttaattaattaattatatattttatttaatttttaaattgatgttgaaatttttatatttaattcaagatgaattaaatactttcatgcattcaa

SEQ ID NO: 2016 - DNA, 225 bp, Unknown
  ITS sequence of Candida glabrat
tcctccgcttattgatatgcttaagttcggcgggtaatcttatctggcttgatgttttatatattgttgatattgaaaatatgtttttctttaatatcaaaatcgttaaaacccacaagtgtatttgatgggtcaagcaacaaacaatcaaacagatataaagccgagtctcctttggctttgcaaaatgcgttcaaagattcgatgattcacagaataatgcac

SEQ ID NO: 2017 - DNA, 225 bp, Unknown
  ITS sequence of Neocallimastix s
tcctccgcttattgatatgcttaagttcagcgggtactcttatctgatttgagatcaagttatttaaataaatttccttttaaaatcgttcccaaccgacgatttcaattaaaatccatttaaagtgaaacaacttgtttatcgttgtaaaacactcataaccataaaatcaaatgattttatgagaatattttactgatactcaaacagacatacttttttagt

SEQ ID NO: 2018 - DNA, 225 bp, Unknown
  ITS sequence of Anaeromyces sp SSD BRL
tcctccgcttattgatatgcttaagttcagcgggtactcttatctgatttgagatcaagttgtttaaaaaatttcctttttgttttgaataagaaaactatttttaaaattgtctaggttattccttggaaaaggaaaattttatccaattttaaaaattgaaattttcaaatccaatttaaaaattcaatttaaagtgaaacaacttgtatcgttgtaaaacac

SEQ ID NO: 2019 - DNA, 225 bp, Unknown
  ITS sequence of Trichoderma virid
tcctccgcttattgatatgcaattttcaaggttcaacccgttcagcttcgctgaccggggcaagaatctcgatacttcgtatcttcgattcttgaaggtttccatcctgaccggtttcccagtctctttgaaaacccaacagtataacatctgagaggctgtcttgtgacaacccgcaagaattcaaactctgtttggattcttgcttcgaagctctgcttcgaa

SEQ ID NO: 2020 - DNA, 225 bp, Unknown
  ITS sequence of Candida glabrat
tcctccgcttattgatatgcttaagttcagcgggtagtcttacgggggggagaaacaaagtagtcgagaacgtgttttctgactgttgattctaaggcccggaggagaaaatgtatgctccaccccgcatgcgccggagcgcgccatgtgcgttcaaagattaatgattcacgtttgcagatcatgatacgtatcgcaatttgctgcgttcttcatcggtacgag

SEQ ID NO: 2021 - DNA, 225 bp, Unknown
  ITS sequence of Candida glabrat
tcctccgcttattgatatgcttaagttcagcgggtactcccatctgatttgagataagtttatagataggccagcgtaattatgtaattcacagtcccacttggattcaaacccactaaataaaaagataggtcaagttgtgttatgctcaaacagatgtacgacaaacgtcgtgcaagatgcgttcaaagattcgatgattcacagaataatgcaattcacatt

SEQ ID NO: 2022 - DNA, 225 bp, Unknown
  ITS sequence of Anaeromyces mucronatu
tcctccgcttattgatatgcttaagttcagcgggtactcttatctgatttgagatcaagttgtttaaaaaatttcctttttgttttgaataagaaaactatttttaaaattgtctaggttattccttgcttaaaggaaaattttatccaattttaaaaattgaaattttcaaatccaattaaaaattcaatttaaagtgaaacaacttgtatcgttgtaaaacac

SEQ ID NO: 2023 - DNA, 225 bp, Unknown
  ITS sequence of Phyllosticta capitalensi
tcctccgcttattgatatgccccttaccgcttcagctgctttaagctcccttaaaacaaactcaagcttttttatgtcaagaaaggccctttcgttacttccctgcgccgaacagaaggggcaatgccccgggcaatacattgtcgggcagattgaaagctgaagctttaaaggtcttttcttttccctgttcggagcaccgtttacggagcagtgataattctt

SEQ ID NO: 2024 - DNA, 225 bp, Unknown
  ITS sequence of Schizangiella serpenti
tcctccgcttattgatattcatatatcctatttgatgagatcaaagaacttaataattacttattttttctttctgtgatcttcttaatattattttattaaaaaataatacccaaatacattatctagttttcaaagaactatttctgagagaacaatctctcaaaactaagcaaaacgttatagctagatcttcttttctacaaatatactccatagaaagga

SEQ ID NO: 2025 - DNA, 225 bp, Unknown
  ITS sequence of Pleosporaceae s
tcctccgcttattgatatgcttaagttcagcgggtatccctacctgatccgaggtcaaaagttgaaaaaaggctttgtggatgctgaccttggctggaagagagcgcgacttgtgctgcgctccgaaaccagtaggccggctgccaattactttaaggcgagtctccagcgaactggagacaagacgcccaacaccaagcaaagcttgagggtacaaatgacgct

SEQ ID NO: 2026 - DNA, 225 bp, Unknown
  ITS sequence of Alternaria sp 3 MU 201
tcctccgcttattgatatgcttaagttcagcgggtatccctacctgatccgaggtcaaaagttgaaaaaaaggcttaatggatgctagacctttgctgatagagagtgcgacttgtgctgcgctccgaaaccagtaggccggctgccaattactttaaggcgagtctccagcaaagctagagacaagacgcccaacaccaagcaaagcttgagggtacaaatgac

SEQ ID NO: 2027 - DNA, 225 bp, Unknown
  ITS sequence of Penicillium brevicompactu
tcctccgcttattgatatgcttaagttcagcgggtatccctacctgatccgaggtcaacctggaaaaaagtttggttgatcggcaggcgccggccagtcctacaaagcgggtgacaaagccccatacgcttgaggaccggacgcggtgccgccgctgcctttcgggcccgtcccccggaaggaggacggagcccaacacacaagccgtgcttgagggcagcaatg

SEQ ID NO: 2028 - DNA, 225 bp, Unknown
  ITS sequence of Cryptococcus terrestri
tcctccgcttattgatatgcttaagttcagcgggtagccctacctgatttcaggtcaaagtcaaaagtgcgcgatggcaggttctgagcagtcatcaccacaaggagagacgaaacttattacgtctaacactgatgtgggatgttccactaagtcatttgaggcgagccatcactggcagacgcccaagtccaagtctaacatgttcagaaaacatattagatt

SEQ ID NO: 2029 - DNA, 225 bp, Unknown
  ITS sequence of Rhizophydium sp MP 00
tcctccgcttattgatatgcttaagttaagagagtcatcttaaaaatttcaaatcaaaataacatttttattgaatttttttatttattaaattcaattttaaatttttttcaattaattattttaattaatttattataatttgtgttatttttttttttaattgatgttgaaatttttatatttaattcaagttgaattaaatactttcatgcattcaaatat

SEQ ID NO: 2030 - DNA, 225 bp, Unknown
  ITS sequence of Monascus purpureu
tcctccgcttattgatatgcttaagttcagcgggtatccctacctgatccgaggtcaacctaaggaaaaaaaggttggagagggcaaaggccccggcccgacctactgagcgggtgacaaagccccatacgctcgaggaccggacgcggcgccgccactgcctttcgggcccgtcccccttgcccggaggcgcaggggacggcggcccaacacacaagccgcgct

SEQ ID NO: 2031 - DNA, 225 bp, Unknown
  ITS sequence of Saccharomycetales s
tcctccgcttattgatatgcttaagttcagcgggtattcctacctgatttgaggtcgagcttatgtattaagttcggcggccaagcgtcctactcatagttcgcttcgcccgcaacgtttcttttcagagcggccccaatgccagggcccccccatttctgctcgcaagcaagaaggaaacgacgctcaaacaggcatgccctccggaataccagagggcgcaat

SEQ ID NO: 2032 - DNA, 225 bp, Unknown
  ITS sequence of Cyllamyces aberensi
tcctccgcttattgatatgcttacgttcagcgggtactcttatctgatttgagatcaagttaatttttacttttttttcctttgtaagtacttttaaaaaatcaaactaattcattcttaaaattgtttaggttattccttttttacgggaaaattttatccaattttaaaaaaaatcagtttttaaatgattttttacaagacaaagaatttaaagtgaaacaa

SEQ ID NO: 2033 - DNA, 225 bp, Unknown
  ITS sequence of Microascaceae s
tcctccgcttattgatatgcttaagttcagcgggtaaccctacctgatccgaggtcaaaccatcaggagttgaggttcgacggctggccttcgccgggacccgatgcgaggtgagctaacttactacgcagggggcgccgcggcgggaccgccacttcatttcagggcctgcgggcaacggtggcccgcagcgccccaacaccgggcggcggcgcggcccacggt

SEQ ID NO: 2034 - DNA, 198 bp, Unknown
  ITS sequence of Orpinomyces sp AF CTS CHO
tcctccgcttattgatatgcttaagttcagcgggtactcttatctgatttgagatcaagttatttataaataaatttcctttaactgtacggtatggaaactattaaaatttctaaaaaactgaaatagctttattccttgttacgacttttacttcccctccgcttattgatatgccttgttacgacttttacttcc

SEQ ID NO: 2035 - DNA, 225 bp, Unknown
  ITS sequence of Trichoderma virid
tcctccgcttattgatatgcttaagttcagcaggtactcccatccgattcgatatgaaatatatttttcgatagagtcataaattcataagactcaatccttcctcatttcagatcaacattacatgagtgatcaaagtttggtcatactcgatcggatgtggaaagcttgcgctccccagcgtgtgcgttcaaaaattggatgattcacagtgtaattgtcatt

SEQ ID NO: 2036 - DNA, 225 bp, Unknown
  ITS sequence of Orpinomyces sp AF CTS CHO
tcctccgcttattgatatgcttaagttaagagagtcatcttaaaaatttcaaatcaaatttaaatatattaagttaatttttaaaaatgttattttaaaattaactcgtttatttatttaattaattgttttaattaattaattatatttattttttttatttttaaattgatgttgaaatttttatatttaattcaagatgaattaaatactttcatgcattca

SEQ ID NO: 2037 - DNA, 225 bp, Unknown
  ITS sequence of Rhizophydium sp MP 00
tcctccgcttattgatatgcttaagttaagagagtcatcttaaaaatttcaaatcaaaaattaaatatttatttgttttaaattaattttttaaataatttaaacaaattcatttatttcaattaattatattaattaatttattataattttatttttaattttttaattgatgttgaaatttttatatttaattctagtagaattaaatactttcatgcattc

SEQ ID NO: 2038 - DNA, 225 bp, Unknown
  ITS sequence of Piromyces sp I GRL 1
tcctccgcttattgatatgcttaagttcagcgggtactcttatctgatttgagatcaagttatttagttaaattttccttttaatgaaaaaatctaatcaaaaaattaaaattgtttaggttattccttttttacgggaaaattttatccaattttattttaaaattagaaaaattcaaattttaaaaaaaatttaaagtgaaacaacttgtatagttgtaaaac

SEQ ID NO: 2039 - DNA, 225 bp, Unknown
  ITS sequence of Paracoccidioides brasiliensi
tcctccgcttattgatatgcttaagttcagcgggtatccctacctgatccgaggtcgatttctagaatatgttaatattcaagtaaaaaaatcagaccggcgacggccgggccgcgtgagcgtactatgttgaaaaaaccccatatgctcgggcaccggagtcgcgacgccgccaatgcatttcaggcaaatccctacatatcaggatgagcccaacacacaagc

SEQ ID NO: 2040 - DNA, 225 bp, Unknown
  ITS sequence of Millerozyma farinos
tcctccgcttattgatatgcttaagttcagcgggtattcctacctgatttgaggtcaaactttgtagattgttgtaaggccgagcctcttttacacagatactaccgctaactgtttcaacgagttggttagacctaatacattgaagagtcaaacggcatttatctactgtaaatactcatgccaatccatttcaagcaaatagatactgaatatctatatcgc

SEQ ID NO: 2041 - DNA, 225 bp, Unknown
  ITS sequence of Trichoderma virid
tcctccgcttattgatatgcttaaattcagctggttcaaattattggaatcagagtaaatcgagactgtcgttgatcttaattagattccacgaaccgcttgcaccacaagactatcttgagtacttcatttcatgtgtaattaagactactgaaatcaataacacgctcattgaggtgttttacatgtgttcagagataaaagttcgaaagatcatagttcgct

SEQ ID NO: 2042 - DNA, 225 bp, Unknown
  ITS sequence of Debaryomyces prosopidi
tcctccgcttattgatatgcttaagttcagcgggtagtcctacctgatttgaggtcaaacttgtttgttatattgtaaggccgagcctagaataccgagaaatatacctttaaactattcaacgagttggataaacctaatacattgaaagtcatatagcactatccagtaccactcatgccaatacatttcaagcaaacgcctagttcgactaagagtatcact

SEQ ID NO: 2043 - DNA, 225 bp, Unknown
  ITS sequence of Vrystaatia aloeicol
tcctcgcttattgatatgcttaagttaagagagtcatcttgaaaatttcaaatcttttttaaattcttttgaccttttcagtttttacgtgattagatcaattcttattcaattaatcaattgctttaattgatttattaaatatgttattttaaaattgtgatgttgaaactttcatatttaattgaagttcaattaaatactttcatgcattcaaatatttac

SEQ ID NO: 2044 - DNA, 225 bp, Unknown
  ITS sequence of Cryptococcus albidu
tcctccgcttattgatatgcttaagttcagcgggtagtcctacctgatttgaggccagatgtcaagagtattaatccgaagatcaatggattagaaagcggtctttagtcctgcaacgcggccatccgaagatgtccttagcgaaatacttattacgccaagtcaaaccatgtcgcgagacagatccagctattacttttaagacgagccgacttatcatcggca

SEQ ID NO: 2045 - DNA, 225 bp, Unknown
  Encodes 16S rRNA from Succinivibrio
agagtttgatcatggctcagattgaacgctggcggcaggcctaatacatgcaagtcgaacggtaacagtagaaaagcttgcttttctagctgacgagtggcggacgggtgagtaacatttgggaaactacctgatagagggggacaacagttggaaacgactgctaataccgcataaagcctgagggtgaaagcagcaatgcgctatcagatgtgcccaaacggg

SEQ ID NO: 2046 - DNA, 225 bp, Unknown
  Encodes 16S rRNA from Prevotella
agagtttgatcatggctcaggatgaacgctagctacaggcttaacacatgcaagtcgaggggcagcatgaagtttgcttgcaaactttgatggcgaccggcgcacgggtgagtaacgcgtatccaaccttccctatactagaggatagcccggcgaaagtcggattaatactctatgttcttcgtagaagacatctgaaatgaagcaaaggtttaccggtatagg

SEQ ID NO: 2047 - DNA, 225 bp, Unknown
  Encodes 16S rRNA from Prevotella
agagtttgatcatggctcaggatgaacgctagctacaggcttaacacatgcaagtcgaggggcagcatgatcgaagcttgctttgattgatggcgaccggcgcacgggtgagtaacgcgtatccaaccttccctatagtagagaatagcccggcgaaagtcggattaatgctctatgttgtatttagaagacatctgaagaataccaaaggtttaccgctatagg

SEQ ID NO: 2048 - DNA, 225 bp, Unknown
  Encodes 16S rRNA from Prevotella
agagtttgatcctggctcaggatgaacgctagctacaggcttaacacatgcaagtcgaggggtaacgatattgaaagcttgctttcgataggcgacgaccggcgcacgggtgagtaacgcgtatccaacctgcccataactaagggataatccgtagaaatgcggtctaataccttatgtgttccgacgaggacatctgaattggaataaagatttatcggttat

SEQ ID NO: 2049 - DNA, 225 bp, Unknown
  Encodes 16S rRNA from Ruminobacter
agagtttgatcatggctcagattgaacgctggcggcaggcttaatacatgcaagtcgaacggtaacatgagaaagcttgctttcttgatgacgagtggcggacgggtgagtaatgcctgggaagctgcctgaatgagggggacaacacctggaaacgggtgctaataccgcgtataccctgagggggaaagaccggatacggtcacattcagatgcgcccaggtg

SEQ ID NO: 2050 - DNA, 225 bp, Unknown
  Encodes 16S rRNA from Syntrophococcus
agagtttgatcctggctcaggatgaacgctggcggcgtgcttaacacatgcaagtcgagcgaagcacagaaacggatttcttcggattgaaggttctgtgactgagcggcggacgggtgagtaacgcgtggggaacctgccctgtaccgggggataacagacagaaatgtctgctaataccgcataagcgcacgagaaggcatcttcttgtgtgaaaaactccgg

SEQ ID NO: 2051 - DNA, 225 bp, Unknown
  Encodes 16S rRNA from Succinivibrio
agagtttgatcatggctcagattgaacgctggcggcaggcctaatacatgcaagtcgaacggtaacataagaaagcttgctttcttgatgacgagtggcggacgggtgagtaatatttgggaagctacctgatagagggggacaacagttggaaacgactgctaataccgcatacagcctgagggtgaaagcagcaatgcgctatcagatgcgcccaaacgggat

SEQ ID NO: 2052 - DNA, 225 bp, Unknown
  Encodes 16S rRNA from Pseudobutyrivibrio
agagtttgatcatggctcaggatgaacgctggcggcgtgcttaacacatgcaagtcgaacgaagcaattttctacgatcccttcggggtgacggattattgactgagtggcggacgggtgagtaacgcgtgggtaacctaccttgtacagggggacaacagttggaaacgactgctaataccgcataagcgcacagcatcgcatgatgcagtgtgaaaagttttt

SEQ ID NO: 2053 - DNA, 225 bp, Unknown
  Encodes 16S rRNA from Prevotella
agagtttgatcatggctcaggatgaacgctagctacaggcttaacacatgcaagtcgaggggcagcataacgaaagcttgcttttgttgatggcgaccggcgcacgggtgagtaacgcgtatccaaccttccccatagtagagaatagcccggcgaaagtcggattaatgctctatgttgtatcatgaggacatctgaataataccaaaggttcaccgctatggg

SEQ ID NO: 2054 - DNA, 225 bp, Unknown
  Encodes 16S rRNA from Prevotella
agagtttgatcatggctcaggatgaacgctagctacaggcttaacacatgcaagtcgaggggcagcatgatcgaagcttgctttgattgatggcgaccggcgcacgggtgagtaacgcgtatccaaccttccctatagtagagaatagcccggtgaaaatcggattaatgctctatgttattcaatgcggacatctaagttgaatcaaaggtttaccgctatagg

SEQ ID NO: 2055 - DNA, 225 bp, Unknown
  Encodes 16S rRNA from Prevotella
agagtttgatcatggctcaggatgaacgctagctacaggcttaacacatgcaagtcgaggggtaacgacagcgaaagcttgcttttgctgggcgacgaccggcgcacgggtgagtaacgcgtatccaacctgcccataactaagggataatccgtagaaatgcggtctaataccttatgtgttccgacgaagacatctgaattggaataaagatttatcggttat

SEQ ID NO: 2056 - DNA, 225 bp, Unknown
  Encodes 16S rRNA from Prevotella
agagtttgatcatggctcaggatgaacgctagctacaggcttaacacatgcaagtcgaggggaaacgatattgaaagcttgctttctttaggcgtcgaccggcgaatgggtgagtaacgcgtatccaacctgcccctgagtaagggatagcccatcgaaagatggattaataccttatggtttcctttgaaggcatcagattaggaataaagatttatcgctgag

SEQ ID NO: 2057 - DNA, 225 bp, Unknown
  Encodes 16S rRNA from Lachnospiracea_incertae_sedis
agagtttgatcatggctcaggatgaacgctggcggcgtgcttaacacatgcaagtcgaacgaagtcttctagacagattccttcgggatgacgactagatgtacttagtggcggacgggtgagtaacgcgtgggtaacctgcctcatacagggggataacagttggaaacagctgctaataccccataagcgcacaatgtcgcatgacaaagtgtgaaaaactcc

SEQ ID NO: 2058 - DNA, 225 bp, Unknown
  Encodes 16S rRNA from Syntrophococcus
agagtttgatcatggctcaggatgaacgctggcggcgtgcttaacacatgcaagtcgagcgaagcacttgaatggatttcttcggattgaagttcttgtgacttagcggcggacgggtgagtaacgcgtgggaaacctgcctcatatcgggggataacagttggaaacgactgctaataccgcataagcgcacagtaccgcatggtacggtgtgaaaaactccgg

SEQ ID NO: 2059 - DNA, 225 bp, Unknown
  Encodes 16S rRNA from Ruminobacter
agagtttgatcatggctcagattgaacgctggcggcaggcttaatacatgcaagtcgaacggtaacagcaggaagcttgcttcctggctgacgagtggcggacgggtgagtaatacctggggagctgcctgaatgagggggacaacacctggaaacgggtgctaataccgcgtaagccctgagggggaaaggctgggcaaccagtcgcattcagatgcgcccagg

SEQ ID NO: 2060 - DNA, 225 bp, Unknown
  Encodes 16S rRNA from Butyrivibrio
agagtttgatcatggctcaggatgaacgctggcggcgtgcctaacacatgcaagtcgaacggagaatttacgctgatgaagcttcggcagattcttgtaaattcttagtggcggacgggtgagtaacgcgtgggcaacctgcctcatactgggggataacagctggaaacgactgttaataccgcataagcgcacggtatcgcatgatacagtgtgaaaaactcc

SEQ ID NO: 2061 - DNA, 225 bp, Unknown
  Encodes 16S rRNA from Clostridium_XlVa
agagtttgatcatggctcaggatgaacgctggcggcgtgcttaacacatgcaagtcgaacgaagcatttacttacgatctcttcggagtgacgagtttatgactgagtggcggacgggtgagtaacgcgtgggtaacctgccttgtacagggggataacagttagaaatgactgctaataccgcataagcgcacagtattgcatgatacagtgtgaaaaactccg

SEQ ID NO: 2062 - DNA, 225 bp, Unknown
  Encodes 16S rRNA from Prevotella
agagtttgatcctggctcaggatgaacgctagctacaggcttaacacatgcaagtcgaggggcagcataatcgaagcttgctttgattgatggcgaccggcgcacgggtgagtaacgcgtatccaaccttccccttagtagggcatagcccggcgaaagtcggattaataccctatgttatccgtcgaggacatctgaaatggattaaagatttatcgctaaggg

SEQ ID NO: 2063 - DNA, 225 bp, Unknown
  Encodes 16S rRNA from Prevotella
agagtttgatcatggctcaggatgaacgctagctacaggcttaacacatgcaagtcgaggggaaacgatattggaagcttgcttccgataggcgtcgaccggcgcacgggtgagtaacgcgtatccaacctgcccatcacttgggaataaccttgcgaaagtaagactaatgcccaatgacatttatagaaggcatctgaaatgaattaaagatttatcggtgat

SEQ ID NO: 2064 - DNA, 225 bp, Unknown
  Encodes 16S rRNA from Lachnospiracea_incertae_sedis
agagtttgatcatggctcaggatgaacgctggcggcgtgcttaacacatgcaagtcgaacggagtacttctcccgagactgaggaagcttgcttctgaagaatcatttgaagtacttagtggcggacgggtgagtaacgcgtgggtaacctgcctcacacagggggataacagttggaaacgactgttaataccgcataagcgcacagtatcgcatgatacagtg

SEQ ID NO: 2065 - DNA, 225 bp, Unknown
  Encodes 16S rRNA from Roseburia
agagtttgatcatggctcaggatgaacgctggcggcgtgcttaacacatgcaagtcgaacggacttatattgaaagtttcggccggatatataagttagtggcggacgggtgagtaacgcgtgggtaacctgccttacaccgggggataacagttggaaacgactgctaataccgcataagcccacagtaccgcatggtacagggggaaaagttgaggcgatgta

SEQ ID NO: 2066 - DNA, 225 bp, Unknown
  Encodes 16S rRNA from Lachnospiracea_incertae_sedis
agagtttgatcatggctcaggatgaacgctggcggcgtgcttaacacatgcaagtcgaacgaagcaacttatcacgattccttcgggatgacgatttgttgactgagtggcggacgggtgagtaacgcgtgggtaacctgccttatacagggggatagcagctggaaacggctgataataccgcataagcgcacagcatcgcatgatgcagtgtgaaaaactccg

SEQ ID NO: 2067 - DNA, 225 bp, Unknown
  Encodes 16S rRNA from Butyrivibrio
agagtttgatcctggctcaggatgaacgctggcggcgtgcctaacacatgcaagtcgaacggagtttaacgctgatgaagcttcggcagattcttgttaaacttagtggcggacgggtgagtaacgcgtgggtaacctgcctcatacagggggatagcagttggaaacgactgataacaccgcataagcgcacggtatcgcatgatacagtgtgaaaatatttat

SEQ ID NO: 2068 - DNA, 225 bp, Unknown
  Encodes 16S rRNA from Pseudobutyrivibrio
agagtttgatcatggctcaggatgaacgctggcggcgtgcttaacacatgcaagtcgaacgaagcagtttattacgatcccttcggggtgacgatttactgactgagtggcggacgggtgagtaacgcgtgggtaacctgccttgtacagggggacaacagttggaaacgactgctaataccgcataagcgcacagcttcgcatgaagcagtgtgaaaagtattt

SEQ ID NO: 2069 - DNA, 225 bp, Unknown
  Encodes 16S rRNA from Turicibacter
agagtttgatcatggctcaggatgaacgctggcggcgtgcctaatacatgcaagtcgaacgaggtgtagcaatacaccgagtggcgaacgggtgagtaacacgtaggtaacctgcccctaagtctgggatacccaggggaaaccttggctaataccggatagcggcggaggggacatcccttccgcacgaaagtcgcgtttgcgacgctttcggatggacctgcg

SEQ ID NO: 2070 - DNA, 225 bp, Unknown
  Encodes 16S rRNA from Lachnospiracea_incertae_sedis
agagtttgatcctggctcaggatgaacgctggcggcgtgcttaacacatgcaagtcgaacggagatttaccacctgcttgcaggaggtaaatcttagtggcggacgggtgagtaacgcgtgggtaacctgcctcacacagggggataacagttggaaacgactgttaataccgcataagcgcacggtatcgcatgatacagtgtgaaaaactccggtggtgtgag

SEQ ID NO: 2071 - DNA, 225 bp, Unknown
  Encodes 16S rRNA from Pseudobutyrivibrio
agagtttgatcctggctcaggatgaacgctggcggcgtgcttaacacatgcaagtcgaacgaagcaatttcttacgatcccttcggggtgacgagttattgactgagtggcggacgggtgagtaacgcgtgggtaacctaccttgtacagggggacaacagttggaaacgactgctaataccgcataagcgcacggtgttgcatgacacagtgtgaaaagttttt

SEQ ID NO: 2072 - DNA, 225 bp, Unknown
  Encodes 16S rRNA from Anaerolinea
agagtttgatcatggctcaggatgaacgctggcggcgtgcctaatacatgcaagtcggacggcagtagcaatactgtagtggcgaacgggtgagtaacacgttggtgacctgccccaaagatgggaatatcacctggaaacgggtggcaaaaccgaataagctcgtgtgagttagagaagcatgagtaaaagagcgatctactttgggaggggcctgcggcccat

SEQ ID NO: 2073 - DNA, 225 bp, Unknown
  Encodes 16S rRNA from Roseburia
agagtttgatcctggctcaggatgaacgctggcggcgtgcttaacacatgcaagtcgaacgaagcactttacttgatctcttcggagtgattgttctgtgactgagtggcggacgggtgagtaacgcgtgggtaacctgccttgtacaggggggataacagttggaaacgactgctaataccgcataagcgcacaggaccgcatggtccggtgtgaaaaactccg

SEQ ID NO: 2074 - DNA, 225 bp, Unknown
  Encodes 16S rRNA from Propionibacterium
agagtttgatcatggctcaggacgaacgctggcggcgtgcttaacacatgcaagtcgaacggaaaggccctgcttttgtggggtgctcgagtggcgaacgggtgagtaacacgtgagtaacctgcccttgactttgggataacttcaggaaactggggctaataccggataggagctcctgctgcatggtgggggttggaaagtttcggcggttggggatggact

SEQ ID NO: 2075 - DNA, 225 bp, Unknown
  Encodes 16S rRNA from Clostridium_XIVa
agagtttgatcatggctcaggatgaacgctggcggcgtgcttaacacatgcaagtcgaacgagccttgtcggacggatcccttcggggtgaagaccggcgctggcgagtggcggacgggtgagtaacgcgtggggaacctgcctcattccgggggataccagtcggaaacggctgttaataccgcataagcgcacggtgtggcatcacacagtgtgaaaaactcc

SEQ ID NO: 2076 - DNA, 225 bp, Unknown
  Encodes 16S rRNA from Olsenella
agagtttgatcatggctcaggatgaacgctggcggcgcgcctaacacatgcaagtcgaacggttaaagcacctccgggtgtgcataaagtggcgaacggctgagtaacacgtgggcaacctgcccctcgcaccgggacagcctcgggaaaccgtggataataccggatactccggcacccccgcatgggggagccgggaaagcccagacggcgagggatgggccc

SEQ ID NO: 2077 - DNA, 225 bp, Unknown
  Encodes 16S rRNA from Streptococcus
agagtttgatcctggctcaggacgaacgctggcggcgtgcctaatacatgcaagtggaacgcagtagtgatcaccggagcttgctccaccgattagtactgagtcgcgaacgggtgagtaacgcgtaggtaacctgccttgaagagggggataactattggaaacgatagctaataccgcataaaatagcgagttgcatgactggctattgaaaggtgcaatcgc

SEQ ID NO: 2078 - DNA, 225 bp, Unknown
  Encodes 16S rRNA from Clostridium_XlVa
agagtttgatcatggctcaggatgaacgctggcggcgtgcctaacacatgcaagtcgaacggagattagacgctgacgagacttcggtcaaatcttgtttaatcttagtggcggacgggtgagtaacgcgtgggcaacctgcctcatactgggggatagcagttggaaacgactgataataccgcataagcgcacgagatcgcatgatctagtgtgaaaaactcc

SEQ ID NO: 2079 - DNA, 225 bp, Unknown
  Encodes 16S rRNA from Clostridium_XlVa
agagtttgatcatggctcaggatgaacgctggcggcgtgcctaacacatgcaagtcgaacggagatttaacgctgatgaagcttcggcagaatcttgttaaatcttagtggcggacgggtgagtaacgcgtgggcaacctgcctcatactgggggatagcagttggaaacgactgataataccgcataagcgcacggagtcgcatgactctgtgtgaaaaactcc

SEQ ID NO: 2080 - DNA, 225 bp, Unknown
  Encodes 16S rRNA from Roseburia
agagtttgatcctggctcaggatgaacgctggcggcgtgcttaacacatgcaagtcgaacgggaattactttttagcttgctaagttgtaattctagtggcggacgggtgagtaacgcgtgggtaacctgccttataccgggggacaacagttggaaacgactgctaataccgcataagcgcacagtctcgcatgagacggtgtgaaaaactccggtggtataag

SEQ ID NO: 2081 - DNA, 225 bp, Unknown
  Encodes 16S rRNA from Clostridium_IV
agagtttgatcatggctcaggacgaacgctggcggcgtgcctaacacatgcaagtcgaacggagatatgtcgaatgaagatttcggttggaatttgatatatcttagtggcggacgggtgagtaacgcgtgagtaacctgccgatgagagtggaataacgttctgaaaagaacgctaataccgcataacgtatcgaagccgcatgacattgataccaaagatttt

SEQ ID NO: 2082 - DNA, 225 bp, Unknown
  Encodes 16S rRNA from Clostridium_XICa
agagtttgatcctggctcaggatgaacgctggcggcgtgcctaacacatgcaagtcgagcggagagccgtaacggaagccttcgggtggaagatacggttacttagcggcggacgggtgagtaacgcgtggataacctggctcatacagggggataacagagagaaatttctgctaataccgcataagcgcacgtaaccgcatggttatgtgtgaaaagccgaga

SEQ ID NO: 2083 - DNA, 225 bp, Unknown
  Encodes 16S rRNA from Lachnospiracea_incertae_sedis
agagtttgatcatggctcaggataaacgctggcggcgtgcttaacacatgcaagtcgaacggagtattccttcggaagatcgaagagcttgctcggagagattctttggaatacttagtggcggacgggtgagtaacgcgtgggtaacctgcctcacacagggggataacagttggaaacgactgttaataccgcataagcgcacagtaccgcatggtacagtgt

SEQ ID NO: 2084 - DNA, 225 bp, Unknown
  Encodes 16S rRNA from Erysipelotrichaceae_incertae_sedis
agagtttgatcctggctcaggatgaacgctggcggcatgcctaatacatgcaagtcgaacggagaaggaaggtgcttgcatcttccggatcagtggcgaacgggtgagtaacacgtaggtaacctgcccatgtacccgggacaacggttggaaacgactgctaaaaccggataggcatatggaaggcatcttcgatatgttaaaggggccacggccctggacatg

SEQ ID NO: 2085 - DNA, 225 bp, Unknown
  Encodes 16S rRNA from Solobacterium
agagtttgatcctggctcaggataaacgctggcggcgtgcctaatacatgcaagtcgatcgctggaattcaagcttgcttgaatgaaggagaggcgaacgggtgagtaatacataagcaacctgcccacgaagactgggataatctctggaaacggggactaataccggataggtaacgaaggcgcatgcctctgttattaaagatgagaagcactggtggatgg

SEQ ID NO: 2086 - DNA, 225 bp, Unknown
  Encodes 16S rRNA from Lachnospiracea_incertae_sedis
agagtttgatcatggctcaggatgaacgctggcggcgtgcttaacacatgcaagtcgaacggagtatctctcccgagaccaaagaagcttgcttctgaggaatcaattgagatacttagtggcggacgggtgagtaacgcgtgggtaacctgcctcacacagggggataacagttggaaacgactgttaataccgcataagcgcacagtaccgcatggtacagtg

SEQ ID NO: 2087 - DNA, 225 bp, Unknown
  Encodes 16S rRNA from Clostridium_XlVa
agagtttgatcctggctcaggatgaacgctggcggcgtgcctaacacatgcaagtcgaacggagatataacgctgcagagacttcggtcaaagcttgttgtatcttagtggcggacgggtgagtaacgcgtgggcaacctgcctcatactgggggataacagttggaaacggctgttaataccgcataagcgcacagagtcgcatgactcagtgtgaaaaactcc

SEQ ID NO: 2088 - DNA, 225 bp, Unknown
  Encodes 16S rRNA from Ralstonia
agagtttgatcatggctcagattgaacgctggcggcatgccttacacatgcaagtcgaacggcagcatgatctagcttgctagattgatggcgagtggcgaacgggtgagtaatacatcggaacgtgccctgtagtgggggataactagtcgaaagattagctaataccgcatacgacctgagggtgaaagtgggggaccgcaaggcctcatgctataggagcgg

SEQ ID NO: 2089 - DNA, 225 bp, Unknown
  Encodes 16S rRNA from Clostridium_XlVa
agagtttgatcctggctcaggatgaacgctggcggcgtgcctaacacatgcaagtcgaacggaagcttaacgctgacgagacttcggtcaaatcttgttaagctttagtggcggacgggtgagtaacgcgtgggcaacctgcctcatactgggggataacagttggaaacgactgttaataccgcataagcgcacagagtcgcatgactcagtgtgaaaaactcc

SEQ ID NO: 2090 - DNA, 225 bp, Unknown
  Encodes 16S rRNA from Eubacterium
agagtttgatcatggctcaggatgaacgctggcggcgtgcctaacacatgcaagtcgagcgggaagctcacaaatgattcttcggatgaatgcgtgagtgaacagcggcggacgggtgagtaacgcgtgggcaacctgccccttactgaaggatagccgagggaaacttcgagtaatacttcataatgcatttttttcacatggagggaatgccaaagatttatc

SEQ ID NO: 2091 - DNA, 225 bp, Unknown
  Encodes 16S rRNA from Lachnobacterium
agagtttgatcatggctcaggatgaacgctggcggcgtgcttaacacatgcaagtcgaacgaagcacctctaatcgaagattgagaaagcttgcttttgattgattcaccttgaggtgactgagtggcggacgggtgagtaacgcgtgggtaacctaccctatacagggggataacagttggaaacgactgctaataccgcataagcgcacaggaccgcatggtc

SEQ ID NO: 2092 - DNA, 225 bp, Unknown
  Encodes 16S rRNA from Acholeplasma
agagtttgatcatggctcaggataaacgctggcggcatgcctaatacatgcaagtcgaacggagttaccttcgggtaacttagtggcgaacgggtgagtaacacgtaggtaatccatcccaaggacgaggatagcttctggaaacggaaggtaaaactggatagttaattaaagggcatcctttagttattaaaagagcaatctaccctgggaagagcctgcggc

SEQ ID NO: 2093 - DNA, 225 bp, Unknown
  Encodes 16S rRNA from Selenomonas
agagtttgatcctggctcaggacgaacgctggcggcgtgcttaacacatgcaagtcgaacgaggtcgaatgagaagcttgctttttatgaagccgagtggcaaacgggtgagtaacgcgtagacaacctgccgtgaagatggggacaacagatcgaaaggtctgctaataccgaatgttgtagatcctccgcatgaaggattcactaaaggtgccctctgtatat

SEQ ID NO: 2094 - DNA, 225 bp, Unknown
  Encodes 16S rRNA from Prevotella
agagtttgatcatggctcaggatgaacgctagctacaggcttaacacatgcaagtcgaggggcagcataacgaaagcttgcttttgttgatggcgaccggcgcacgggtgagtaacgcgtatccaaccttccctatagtagagaatagcccggcgaaagtcggattaatgctctatgttgtatttagaagacatctgaagaataccaaaggtttaccgctatagg

SEQ ID NO: 2095 - DNA, 225 bp, Unknown
  Encodes 16S rRNA from Clostridium_XlVa
agagtttgatcatggctcaggatgaacgctggcggcgtgcctaacacatgcaagtcgaacggagatttaacgctgatgaggcttcggcggaatcttgttaaatcttagtggcggacgggtgagtaacgcgtgggcaacctgcctcatactgggggataacagttggaaacgactgttaataccgcataagcgcacagtgtcgcatgacacagtgtgaaaaactcc

SEQ ID NO: 2096 - DNA, 225 bp, Unknown
  Encodes 16S rRNA from Succinivibrio
agagtttgatcatggctcagattgaacgctggcggcaggcctaatacatgcaagtcgaacggtaacatggaagtagcaatacttttgatgacgagtggcggacgggtgagtaatatttgggaatctacctatcagagggggatagcaactggaaacggttgataagaccgcgtacgctctgaggaggaaagtaatgggatcgcaagaccattagctgatagatga

SEQ ID NO: 2097 - DNA, 225 bp, Unknown; identical to SEQ ID NO: 2059
  Encodes 16S rRNA from Ruminobacter

SEQ ID NO: 2098 - DNA, 225 bp, Unknown
  Encodes 16S rRNA from Sharpea
agagtttgatcctggctcaggatgaacgctggcggcgtgcctaatacatgcaagtcggacggagcgcttcggcgctcagtggcgaacgggtgagtagcacatgggcaacctgcccttcagagggggacaacagctggaaacggctgctaagaccgcataggcgcggacgggacatcccgtccacgttaaacgtccttacggggacggctgaaggatgggcctgtg

SEQ ID NO: 2099 - DNA, 225 bp, Unknown
  Encodes 16S rRNA from Prevotella
agagtttgatcctggctcaggatgaacgctagctacaggcttaacacatgcaagtcgaggggaaacggcattttagcttgctaagatggacgtcgaccggcgaatgggtgagtaacgcgtatccaaccttccgttaagtagggaatagccttgcgaaagtaagattaatgccctatgtggtgttttgaggacatctgaagatcaccaaaggtttaccgcttaacg

SEQ ID NO: 2100 - DNA, 225 bp, Unknown
  Encodes 16S rRNA from Prevotella
agagtttgatcatggctcaggatgaacgctagctacaggcttaacacatgcaagtcgaggggtaacgacagcgaaagcttgcttttgctggtcgacgaccggcgaatgggtgagtaacgcgtatccaacctgccgcaaagtagggcacagccttgcgaaagtaagattaatgccctatgtgctgtgatgaggacatctgaattgcagtaaaggttcaccgctttg

SEQ ID NO: 2101 - DNA, 225 bp, Unknown; identical to SEQ ID NO: 2046
  Encodes 16S rRNA from Prevotella

SEQ ID NO: 2102 - DNA, 225 bp, Unknown
  Encodes 16S rRNA from Prevotella
agagtttgatcctggctcaggatgaacgctagctacaggcttaacacatgcaagtcgaggggcagcattatcgaagcttgctttgatagatggcgaccggcgcacgggtgagtaacgcgtatccaaccttccccttagtagggcatagcccgtagaaatgcggattaataccctatgttgtattatgaggacatctgaataataccaaaggttcaccgctaaggg

SEQ ID NO: 2103 - DNA, 225 bp, Unknown
  Encodes 16S rRNA from Prevotella
agagtttgatcatggctcaggatgaacgctagctacaggcttaacacatgcaagtcgaggggcatcagatcgaaagcttgcttttgatgctggcgaccggcgcacgggtgagtaacgcgtatccaaccttccctatagtagagaatagcccggcgaaagtcggattaatgctctatgttgtatttagaagacatctgaagaataccaaaggtttaccgctatagg

SEQ ID NO: 2104 - DNA, 225 bp, Unknown
  ITS sequence of Orpinomyces
tcctccgcttattgatatgcttaagttcagcgggtactcttatctgatttgagatcaagttattttgttaaatttccttttaattaggctcaactaaagttttaccttttaaaactgaaaagttattcctttttacgggaaaattttatccaattttattagataaaaccaaaattggcttttaaaaatcaatttaaagtgaaacaacttgtttatcgttgtaaa

SEQ ID NO: 2105 - DNA, 225 bp, Unknown
  ITS sequence of Piromyces
tcctccgcttattgatatgcttaagttcagcgggtactcttatctgatttgagatcaagttatttagttaaattttccttttagtttggattttctaatcaaaaattaaaattgtttaggttattcctttttacgggaaaattttatccaattttattttaaaattagaaaaattcaaattttaaaaaaatttaaagtgaaacaacttgtatcgttgtaaaacac

SEQ ID NO: 2106 - DNA, 225 bp, Unknown
  ITS sequence of Piromyces
tcctccgcttattgatatgcttaagttcagcgggtactcttatctgatttgagatcaagttatttagttaaattttcctttataattgaaaagaattctaatcaaaaattaaaattgtttaggttattccttttttacgggaaaattttatccaattttattttaaaattagaaaaattcaaattttaaaaaaaatttaaagtgaaacaacttgtatcgttgtaa

SEQ ID NO: 2107 - DNA, 225 bp, Unknown
  ITS sequence of Piromyces
tcctcgcttattgatatgcttaagttcagcgggtactcttatctgatttgagatcaagttatttattaaattttcctttataatgaaaaattctaatcaaaaaactaaaattgtttaggttattccttttttacgggaaaattttatccaattttattttaaaattagaaaaattcaaattttaaaaaaatttaaagtgaaacaacttgtatcgttgtaaaacac

SEQ ID NO: 2108 - DNA, 1525 bp, Unknown
  Encodes 16S rRNA from Ruminococcus bovis sp. nov.
aaattattagagagtttgatcctggctcaggatgaacgctggcggcgtgcctaacacatgcaagtcgaacggaacttctttgacagaattcttcggaaggaagttgattaagtttagtggcggacgggtgagtaacgcgtgagtaacctgcctttgagaggggaataacttcccgaaagggatgctaataccgcatgatgcatagaagtcgcatggcttttatgccaaagatttatcgctcaaagatggactcgcgtccgattagccagttggcggggtaacggcccaccaaagcgacgatcggtagccggactgagaggttgaacggccacattgggactgagacacggcccagactcctacgggaggcagcagtgggggatattgcgcaatgggggcaaccctgacgcagcaacgccgcgtgaaggatgaaggttttcggattgtaaacttcttttatttaggacgaacaatgacggtactaaatgaataagctccggctaactacgtgccagcagccgcggtaatacgtagggagcaagcgttatccggtttactgggtgtaaagggtgcgtaggcggcttggtaagtcagatgtgaaatgtatgggctcaacccatgaactgcatttgaaactattgagcttgagtgaagtagaggtaggcggaattcctgtgtagcggtgaaatgcgtagagatagggaggaacaccagtggcgaaggcggcctactgggctttaactgacgctgaggcacgaaagcgtgggtagcaaacaggattagataccctggtagtccacgctgtaaacgatgattactaggtgtggggggtctgaccccttccgtgccggagttaacacaataagtaatccacctggggagtacgaccgcaaggttgaaactcaaaggaattgacgggggcccgcacaagcagtggagtatgtggtttaattcgaagcaacgcgaagaaccttaccaggtcttgacatcgagtgacgaatctagagatagatttttccttcgggacacgaagacaggtggtgcatggttgtcgtcagctcgtgtcgtgagatgttgggttaagtcccgcaacgagcgcaacccttgctattagttgctacgcaagagcactctaataggactgccgttgacaaaacggaggaaggtggggacgacgtcaaatcatcatgccccttatgacctgggctacacacgtactacaatggatgttaacagagggaagcaaaatagcgatatggagcaaaccctaaaagcattcccagttcagattgcaggctgcaactcgcctgtatgaagttggaattgctagtaatcgcggatcagcatgccgcggtgaatacgttcgggccttgtacacaccgcccgtcacaccatggggagcggtaatacccgaagccagtagtttaaccttaggagagcgctgtcgaaggtaggattggcgactggggtgaagtcgtaacaaggtagccgtatcggaaggtgcggctggatcacctcctttcta

SEQ ID NO: 2109 - DNA, 297 bp, Ruminococcus bovis
gcaccaaatgcaaaggtatatttgattcttgcaggaatcttgccgtcaagtctgcgttcagaactgcgtttcataaaaaatcctccttaaatataaaaaatgaaactaaccgtacaaaatgcataaaagaaattaatattattaattattaatatgctttttgcttatctgttaactaaattatatgttttgtttcataaaaagtcaatatatttagtaaacaaaattaaagtttatctatttttcactaaacaacccttgcgtatttagtaaatattcactataataagggtagag

SEQ ID NO: 2110 - DNA, 297 bp, Ruminococcus bovis
gcaccaaatgcaaaggtatatttgattcttgcaggaatcttgccgtcaagtctgcgttcagaactgcgtttcataaaaaatcctccttaaatataaaaaatgaaactaaccgtacaaaatgcataaaagaaattaatattattaattattaatatgctttttgcttatctgttaactaaattatatgttttgtttcataaaaagtcaatatatttagtaaacaaaattaaagtttatctatttttcactaaacaacccttgcgtatttagtaaatattcactataataagggtagat

SEQ ID NO: 2111 - DNA, 307 bp, Ruminococcus bovis
tttcactcaataactgcattggacttttgtattcaagtgttctcattgtcttgttattactccattctaaatgtccttttaactttgtatttaattcttcaatatttttgaatgtttcccaatcatagaaatatctttggtcgtttctatgacttctttctaccttcccattgtgccaaggtgttcgtggtggtattaatttatgatttatacctaatttgttcaattctatttcaaaaggacttttcacttcactgctttgatatttatatgtgaactctcttccgttatctgtttgaaccgtctt

SEQ ID NO: 2112 - DNA, 307 bp, Ruminococcus bovis
tttcactcaataactgcattggacttttgtattcaagtgttctcattgtcttgttattactccattctaaatgtccttttaactttgtatttaattcttcaatatttttgaatgtttcccaatcatagaaatatctttggtcgtttctatgacttctttctaccttcccattgtgccaaggtgttcgtggtggtattaatttatgatttatacctaatttgttcaattctatttcaaaaggacttttcacttcactgctttgatatttatatgtgaactctcttccgttatctgtttgaatagtctg

SEQ ID NO: 2113 - DNA, 301 bp, Ruminococcus bovis
tattctctaaaagaaaataaatttgaacaatcatacaaattacaaaaatgaaattttctgttctggaataaaaagaccataaaagcaccgaaaaagcccatcagaatgggcttttctttatgttataaccgactaaaaataagtaaaaataaaatcaaaaaattttaaaaaaaactctttacaatactaaaaataggtgaaattatatacttatttttattgtattgaactttgttatattgtataatagttttagaaaattaatttaaggggtatattttatgcttgataatttttataa

SEQ ID NO: 2114 - DNA, 300 bp, Ruminococcus bovis
tattctctaaaagaaaataaatttgaacaatcatacaaattacaaaaatgaaattttctgttctggaataaaaagaccataaaagcaccgaaaaagcccatcagaatgggcttttctttatgttataaccgactaaaaataagtaaaaataaaatcaaaaaattttaaaaaaaactctttacaatactaaaaataggtgaaattatatacttatttttattgtattgaactttgttatattgtataatagttttagaaaattaatttaaggggtatattttatgcttgataatttttata

SEQ ID NO: 2115 - DNA, 118 bp, Ruminococcus bovis
cgccccaagaatgatagtgtttgcgttttttactaaaattccgttttaattctctgctgattgtagaaggacttcgttcaagtatttttgcaatttttcttatgctatatcctttcca

SEQ ID NO: 2116 - DNA, 118 bp, Ruminococcus bovis
cgccccaagaatgatagtgtttgcgttttttactaaaattccgttttaattctctgctgattgtagaaggacttcgttcaagtatttttgcaatttttcttatgctatatcctttttc

SEQ ID NO: 2117 - DNA, 106 bp, Ruminococcus bovis
ttactaaatattttacatgtgcgccccaagaatgatagtgtttgcgttttttactaaaattccgttttaattctctgctgattgtagaaggacttcgttcaagtat

SEQ ID NO: 2118 - DNA, 107 bp, Ruminococcus bovis
ttactaaatattttacatgtgcgccccaagaatgatagtgtttgcgttttttactaaaattccgttttaattctctgctgattgtagaaggacttcgttcaagtatt

SEQ ID NO: 2119 - DNA, 298 bp, Ruminococcus bovis
taatcagattgaacgcgatatcaattccgaaaatgccccgaatgttgttaaggattacacaagcaacgcgaaaatcaaaatctctccgctgggtatctctcttacgggcgagtgtgatgagaaatatgacaagcaaatgccggattggggcagtcgctgctttgagattcccgacacagacggcaaatcaaaggtaacaatggatgacggaacagtttattatatccttgtaaacgagggcggcgagcgcaggacagacgacagcggcgttttccatgagaatgcacagcttcaatac

SEQ ID NO: 2120 - DNA, 298 bp, Ruminococcus bovis
taatcagattgaacgcgatatcaattccgaaaatgccccgaatgttgttaaggattacacaagcaacgcgaaaatcaaaatctctccgctgggtatctctcttacgggcgagtgtgatgagaaatatgacaagcaaatgccggattggggcagtcgctgctttgagattcccgacacagacggcaaatcaaaggtaacaatggatgacggaacagtttattatatccttgtaaacgagggcggcgagcgcaggacagacgacagcggcgttttccatgagaatgcacagcttcaatat

SEQ ID NO: 2121 - DNA, 298 bp, Ruminococcus bovis
aaaaggtactgcaccatttactttgttagattattttccaaaggactttctgctttttgttgatgaaagccatgttactttacctcaggttagaggtatgtatggtggtaacctttcaagaaagaaaagtcttattgattatggctttagattaccgtcagcatatgacaaccgtcctttaaattttgatgaattttatgatagaataaatcaagtctgctttgtttcagcaacaccgggcgacttagaacttgaaaagagcagtgttgttgcagaacaaattatccgtccaacaggc

SEQ ID NO: 2122 - DNA, 298 bp, Ruminococcus bovis
aaaaggtactgcaccatttactttgttagattattttccaaaggactttctgctttttgttgatgaaagccatgttactttacctcaggttagaggtatgtatggtggtaacctttcaagaaagaaaagtcttattgattatggctttagattaccgtcagcatatgacaaccgtcctttaaattttgatgaattttatgatagaataaatcaagtctgctttgtttcagcaacaccgggcgacttagaacttgaaaagagcagtgttgttgcagaacaaattatccgtccaacagga

SEQ ID NO: 2123 - DNA, 202 bp, Ruminococcus bovis
tgccacaaaaaatataaatatataggggcaaaattacaactaaacacacccaaataatcaagacttgctctacttgtaaaatcagttggaaataaaaagtcaaaggactttttaaattctaaatcggtatttaccccaaaatatatacccagaataaaacctactaaaattgaaataagaaacatagtaaagataccgtatc

SEQ ID NO: 2124 - DNA, 204 bp, Ruminococcus bovis
tgccacaaaaaatataaatatataggggcaaaattacaactaaacacacacccaaataatcaagacttgctctacttgtaaaatcagttggaaataaaaagtcaaaggactttttaaattctaaatcggtatttaccccaaaatatatacccagaataaaacctactaaaattgaaataagaaacatagtaaagataccgtatc

SEQ ID NO: 2125 - DNA, 225 bp, Unknown
  bacterial strain Ascusb_126 encodes 16S rRNA
agagtttgatcatggctcaggatgaacgctggcggcgtgcctaacacatgcaagtcgaacggagttactagagcttgctttggtaacttagtggcggacgggtgagtaatgtatgagcaacctgcctttcagagggggacaacagttggaaacgactgctaataccgcataatgtacgaggggggcatcccttttgtaccaaaggagcaatccgctgaaagatgg

SEQ ID NO: 2126 - DNA, 225 bp, Unknown
  bacterial strain Ascusb_51 encodes 16S rRNA
agagtttgatcctggctcaggatgaacgctagctacaggcttaacacatgcaagtcgaggggaaacggcagtctagcttgctagagtggacgtcgaccggcgaatgggtgagtaacgcgtatccaaccttccgcgaagtacggaatagccttgcgaaagtaagattaatgccgtatgtggtgtttggaagacatctgaagaacactaaagatttatcgcttcgcg

SEQ ID NO: 2127 - DNA, 225 bp, Unknown
  bacterial strain Ascusb_1366 encodes 16S rRNA
agagtttgatcatggctcaggatgaatgctggcggcgtgcctaatacatgcaagtcgagcggtaacagggagttccaccgtttccttgacacacctagcgctttatcgtaggttgttgacttcgagggaaccgtggaattctgctgacgagcggcggacggctgagtaacgcgtgggaacggaccccaaactgagggataacgcaccgaaaggtgtgctaatacc

SEQ ID NO: 2128 - DNA, 225 bp, Unknown
  bacterial strain Ascusb_64 encodes 16S rRNA
agagtttgatcatggctcaggacgaacgctggcggcgtgcctaacacatgcaagtcgaacggagttgaggagcttgctcctcaacttagtggcggacgggtgagtaacgcgtgagtaacctgcctctgagaggggaataacgttctgaaaagaacgctaataccgcataacacatatttgccgcatgacagatatgtcaaagattttatcgctcagagatggact

SEQ ID NO: 2129 - DNA, 225 bp, Unknown
  bacterial strain Ascusb_299 encodes 16S rRNA
agagtttgatcatggctcaggatgaatgctggcggcgtgcctaatacatgcaagtcgagcggcagcgagggtctcatcctattctggaagctttcgagaatagaatgagatctgtcggcgagcggcggacggctgagtaacgcatgggaacgcaccccaaactgagggataactagtcgaaagattagctaataccgcatgtgatcttcggattaaagctttcgg

SEQ ID NO: 2130 - DNA, 225 bp, Unknown
  bacterial strain Ascusb_341 encodes 16S rRNA
agagtttgatcatggctcaggatgaatgctggcggcatgcctaatacatgcaagtcgagcggcagcgagggtctcatcctgttcttgaagttttcgagaatagaatgagatctgtcggcgagcggcggacggctgagtaacgcgtgggaacggaccccaaactgagggataactagtcgaaagattagctaataccgcatgtgatcttcggattaaagctttcga

SEQ ID NO: 2131 - DNA, 225 bp, Unknown
  bacterial strain Ascusb_295 encodes 16S rRNA
agagtttgatcatggctcaggatgaacgctagcgaaatgcctaacacatgcaagtcgaacggaccttgcgtcgtagcaatacgtagtaaggttagtggcaaacgagcgagtaacgcgtgcttaacctgccccgaagttgggtataactacagagatgtagctaattcccaatatgctcacgatggtgaaatcccaatgggaggaaagatttatcgcttcgggagg

SEQ ID NO: 2132 - DNA, 225 bp, Unknown
  bacterial strain Ascusb_288 encodes 16S rRNA
agagtttgatcatggctcaggatgaacgctagcggcaggcttaacacatgcaagtcgaggggcatcgcgggtagcaatacctggcggcgaccggcgaaagggtgagtaacgcgtgagcaacgtgcccgtatgtgggggatagtcgatggaaacgtcgcgtaataccccgtaacacatttggccgcatggccatatgttgaaagatttattgcatacggatcggct

SEQ ID NO: 2133 - DNA, 225 bp, Unknown
  bacterial strain Ascusb_127 encodes 16S rRNA
agagtttgatcatggctcaggatgaatgctggcggcatgcctaatacatgcaagtcgagcggtaacaggactagcttgctagttgctgacgagcggcggacggctgagtaacgcatgggaacgcaccccaaactgagggataactagtcgaaagattagctaataccgcatgtgatcttcggattaaagccttcgggcggtttgggagcggcctgtgtacgatta

SEQ ID NO: 2134 - DNA, 225 bp, Unknown
  bacterial strain Ascusb_1139 encodes 16S rRNA
agagtttgatcatggctcaggatgaatgctggcggcgtgcctaatacatgcaagtcgagcggtaacagggtttcaccgtgttcttgacactccgggctttaagcgggaggttagatttcgaggacaccgtgaagctgctgacgagcggcggacggctgagtaacgcgtgggaacataccccaaactgagggataacgcaccgaaaggtgtgctaataccgcatat

SEQ ID NO: 2135 - DNA, 225 bp, Unknown
  bacterial strain Ascusb_328 encodes 16S rRNA
agagtttgatcatggctcaggatgaatgctggcggcatgcctaatacatgcaagtcgagcggtaacaggactagcttgctagttgctgacgagcggcggacggctgagtaacgcgtgggaacggaccccaaactgagggataacgcaccgaaaggtgtgctaataccgcatgtgatcttcggattaaagctttcgagcggtttgggactggcctgcgtacgatta

SEQ ID NO: 2136 - DNA, 225 bp, Unknown
  bacterial strain Ascusb_13271 encodes 16S rRNA
agagtttgatcctggctcaggacgaacgctggcggcgtgcctaacacatgcaagtcgaacgaagcactggaattgatttcttcggaatgatttttctttgactgagtggcggacgggtgagtaacacgtgagcaacctgcctttcagagcgggatagcagttggaaacgactgataataccgcatgacatgtctcttccgcatgagagagacatcaaatgatttt

SEQ ID NO: 2137 - DNA, 225 bp, Unknown; identical to SEQ ID NO: 2129
  bacterial strain Ascusb_299 encodes 16S rRNA

SEQ ID NO: 2138 - DNA, 225 bp, Unknown
  bacterial strain Ascusb_10845 encodes 16S rRNA
agagtttgatcctggctcaggatgaacgctggcggcgtgcctaacacatgcaagtcgaacgaagctcgatcctcggagatttcggtcaaagaggaaagatgacttagtggcggacgggtgagtaatgcgtgagcaacctgccttggagtgggggacaacagttggaaacgactgctaataccgcataatgtattcggggggcatcctctggataccaaagattta

SEQ ID NO: 2139 - DNA, 225 bp, Unknown
  bacterial strain Ascusb_1785 encodes 16S rRNA
agagtttgatcatggctcaggatgaacgctagcggcaggcttaacacatgcaagtcgaggggcagcgtggagtagcaatactctgacggcgaccggcgaaagggtgagtaacgcgtgagcaacatgcccggtactgggggatagtcgatggaaacgtcgcgtaataccccgtaacaacagaggccgcatgacctttgtttaagagattcattgataccggattgg

SEQ ID NO: 2140 - DNA, 225 bp, Unknown
  bacterial strain Ascusb_464 encodes 16S rRNA
agagtttgatcatggctcaggatgaacgctggcggcgtgcctaacacatgcaagtcgaacgaagcacttccggtttgagattcgtcaagaactggatttgacttagtggcggacgggtgagtaatgtatgagcaacctgcctttcagagggggacaacagttggaaacgactgctaataccgcataatgttttgagagggcatccttttgaaaccaaaggagcaa

SEQ ID NO: 2141 - DNA, 225 bp, Unknown
  bacterial strain Ascusb_651 encodes 16S rRNA
agagtttgatcatggctcaggacgaacgctggcggcacgcttaacacatgcaagtcgaacggagttggaggagcttgctctttcaacttagtggcggacgggtgagtaacacgtgagcaacctaccttcaagcggggaataatggagggaaacttccactaataccccataagatagtatttccgcatggagaagctatcaaagatttattgtttgaagatgggc

SEQ ID NO: 2142 - DNA, 225 bp, Unknown
  bacterial strain Ascusb_17652 encodes 16S rRNA
agagtttgatcatggctcaggacgaacgctggcggcgtgcttaacacatgcaagtcgaacgaagcactgaaattgatttcttcggaatgatttttctttgactgagtggcggacgggtgagtaacacgtgagcaacctgcctttcagagcgggatagcagttggaaacgactgataataccgcatgacatgttttctccgcatgaggaaaacatcaaatgatttt

SEQ ID NO: 2143 - DNA, 225 bp, Unknown
  bacterial strain Ascusb_18 encodes 16S rRNA
agagtttgatcctggctcaggataaacgctggcggcgtgcctaatacatgcaagtcgaacgagggaaggcaagcttgcttgccggaacgagtggcgaacgggtgagtaatacataagcaacctgcctgtaaggaccgggataatgcctggaaacgggtactaaaaccggataggcatagatggggcatcccatttatgttaaaggtgagagacacaaacagatgg

SEQ ID NO: 2144 - DNA, 225 bp, Unknown
  bacterial strain Ascusb_5387 encodes 16S rRNA
agagtttgatcctggctcaggacgaacgctggcggcgtgcctaacacatgcaagtcgaacggagttattttgattgatcccttcggggtgattgatttttaacttagtggcggacgggtgagtaacgcgtgagtaacctgcctttgagagggggataacgttctgaaaagaacgctaataccgcatgacatatcgaagccgcatggctttgatatcaaagattta

SEQ ID NO: 2145 - DNA, 225 bp, Unknown
  bacterial strain Ascusb_1702 encodes 16S rRNA
agagtttgatcatggctcaggatgaacgctagcggcaggcttaacacatgcaagtcgaggggcagcgggtgtagcaatacatgccggcgaccggcgaaagggtgagtaacgcgtgagcaacgtgcccgtatgtgggggatagtcgatggaaacgtcgcgtaataccccgtaacacagatcctcgcatggggatttgttgaaagatttattgcatacggatcggct

SEQ ID NO: 2146 - DNA, 225 bp, Unknown
  bacterial strain Ascusb_2137 encodes 16S rRNA
agagtttgatcatggctcaggatgaacgctagcggcaggcttaacacatgcaagtcgaggggcagcgcgaggtagcaatactttggcggcgaccggcgaaagggtgagtaacgcgtgagcaacatgcccgatagtggaggatagtcgatggaaacgtcgtgtaatactccgtaacaacagaggccgcatgacctttgtttaatagatttatcgctatcggattgg

SEQ ID NO: 2147 - DNA, 225 bp, Unknown
  bacterial strain Ascusb_479 encodes 16S rRNA
agagtttgatcatggctcaggatgaacgctggcggcgtgcttaacacatgcaagtcgaacggggttacgatgtgtgaggaaagaagcttgctttggactaaacttttcgtaacctagtggcggacgggtgagtaacgcgtgggtaacctgccgtatgccgggggacaacagttggaaacgactgctaataccgcataagcgcacagacaggcatctgtcagtgtg

SEQ ID NO: 2148 - DNA, 225 bp, Unknown
  bacterial strain Ascusb_325 encodes 16S rRNA
agagtttgatcatggctcaggatgaatgctggcggcatgcctaatacatgcaagtcgagcggtaacatgaatagcttgctatttgatgacgagcggcggacggctgagtaacgcgtgggaacataccccagactgagggataactactcgaaagagtagctaataccgcatacgatctacggattaaagctttcgggcggtttgggaatggcctgcgtacgatta

SEQ ID NO: 2149 - DNA, 225 bp, Unknown
  bacterial strain Ascusb_5213 encodes 16S rRNA
agagtttgatcctggctcaggatgaacgctggcggcatgcctaagacatgcaagtcgaacgaagtagcctaatgaagaccgagtgcttgcacaaagtcggatttagatttctacttagtggcagacgggtgagtaacacgtgggtaacctacctcagagactgggataacagttagaaatgattgctaataccggatgattcatagttagataactaattatgct

SEQ ID NO: 2150 - DNA, 225 bp, Unknown
  bacterial strain Ascusb_372 encodes 16S rRNA
agagtttgatcatggctcagaacgaacgctggcggcgcgtcttaagcatgcaagtcgagcggtaagttgtagcttgctacaacctagagcggcggactggtgagtaacgcgtgggtgacgtacccttttgacggggatagcctgtggaaacacagggtaataccggataagctggcttgtgtcagaggcaagacaggaaaggttcttttgaaccgcgaaaggagc

SEQ ID NO: 2151 - DNA, 225 bp, Unknown
  bacterial strain Ascusb_1104 encodes 16S rRNA
agagtttgatcatggctcagaacgaacgctggcggcgcgtcttaagcatgcaagtcgaacggcaagaagagagcttgctctcttcctagagtggcggactggtgagtaacacgtgggtgacgtaccctttggacggggatagccgatagaaatatcgggtaataccggataaggacacacaggttggagctgtgtgtggaaagtagctacggctacgccgaagga

SEQ ID NO: 2152 - DNA, 225 bp, Unknown
  bacterial strain Ascusb_2837 encodes 16S rRNA
agagtttgatcatggctcaggatgaacgctagcggcaggcttaacacatgcaagtcgaggggcagcggggtgtagcaatacaccgccggcgaccggcgcacgggtgcgtaacgcgtatgcaacctgcccgtaacagggggataacggggagaaattcccactaataccccgtatagcggaggggccgcatggttcttccgcgaaagcttcggcggttacggatgg

SEQ ID NO: 2153 - DNA, 225 bp, Unknown
  bacterial strain Ascusb_466 encodes 16S rRNA
agagtttgatcatggctcaggatgaatgctggcggcatgcctaatacatgcaagtcgagcggcaacgagggtttcatcctattctggaagttttcgagaatagaatgaaacctgtcggcgagcggcggacggctgagtaacgcgtgggaacgtaccccaaactgagggataactagtcgaaagattagctaataccgcatgtgatcttcggattaaagctttcgg

SEQ ID NO: 2154 - DNA, 225 bp, Unknown
  bacterial strain Ascusb_3733 encodes 16S rRNA
agagtttgatcctggctcaggataaacgctggcggcgcacataagacatgcaagtcgaacggaagtcgttatactgattttgataagaacggagaacttgttcaaagggacttgatgaagatttataacaatggctttagtggcggactggtgagtaacgcgtgagcaacctgcctatcagaggggaacaacagttagaaatgactgctaataccgcatatgcct

SEQ ID NO: 2155 - DNA, 225 bp, Unknown
  bacterial strain Ascusb_191 encodes 16S rRNA
agagtttgatcctggctcaggacgaacgctggcggcgtgcctaacacatgcaagtcgaacgaagctgctgagactgatttcttcggattgacgattcagcagacttagtggcggacgggtgagtaacacgtgagcaacctgcctctcagagagggataacagttggaaacgattgataatacctcatgatatgtttttgccgcatgacgaaaacatcaaagattt

SEQ ID NO: 2156 - DNA, 225 bp, Unknown
  bacterial strain Ascusb_8129 encodes 16S rRNA
agagtttgatcatggctcaggatgaacgctggcggcatgcctaagacatgcaagtcgaacgaggtgccccgatgaagatgaagtgcttgcacagatttggattcggatcagcacctagtggcggacgggtgagtaacacgtgggtgacctacctttgagactgggatacctattggaaacgatagttaataccggataacacattaattcgttttaatgttaaaa

SEQ ID NO: 2157 - DNA, 225 bp, Unknown
  bacterial strain Ascusb_20150 encodes 16S rRNA
agagtttgatcctggctcaggatgaacgctggcggcatgcctaagacatgcaagtcgaacgagaaggcccactgacatttattgaaactctgcgagcttgctcaaagagcggatttaaattgacgtggattttccttctagtggcaaacgggtgagtaacacgtgggttacctgcctcaaagatcgggatacctattggaaacgatagttaataccgaatgtgat

SEQ ID NO: 2158 - DNA, 225 bp, Unknown
  bacterial strain Ascusb_346 encodes 16S rRNA
agagtttgatcatggctcaggatgaatgctggcggcatgcctaatacatgcaagtcgagcggcagcgaggatctcatcctattctggattcattcgagaatagaatgagatctgtcggcgagcggcggacggctgagtaacgcatgggaacgcaccccaaactgagggataactagtcgaaagattagctaataccgcatgtgatcttcggattaaagctttcgg

SEQ ID NO: 2159 - DNA, 225 bp, Unknown
  bacterial strain Ascusb_3204 encodes 16S rRNA
agagtttgatcctggctcaggatgaacgctggcggcatgcctaagacatgcaagtcgaacgagacgaccttaagaagactgagtgcttgcacgaagttggaagaagatcatcgtctagtggcagacgggtgagtaacacgtgggtaacctaccttcaagttggggataacagttggaaacgattgctaataccgaataagatattcgtattgaaaggagccttta

SEQ ID NO: 2160 - DNA, 225 bp, Unknown
  bacterial strain Ascusb_20912 encodes 16S rRNA
agagtttgatcctggctcaggacgaacgctggcggcgtgcctaacacatgcaagtcgaacggaactattttgactgattccttcgggatgaagaatttttagtttagtggcggacgggtgagtaacgcgtgagtaacctgcctctgagaggggaataacgttctgaaaagaacgctaataccgcataacacatatttgccgcatgacagatatgtcaaagatttt

SEQ ID NO: 2161 - DNA, 225 bp, Unknown
  bacterial strain Ascusb_248 encodes 16S rRNA
agagtttgatcatggctcaggacgaacgctggcggcgtgcctaacacatgcaagtcgaacggaactattttgacagatttcttcggaatgatggatttttagtttagtggcggacgggtgagtaacgcgtgagtaacctgcctctaagaggggaataacgttctgaaaagatcgctaataccgcataacatattgaagtcgcatgactttgatatcaaagattta

SEQ ID NO: 2162 - DNA, 225 bp, Unknown
  bacterial strain Ascusb_1794 encodes 16S rRNA
agagtttgatcatggctcaggatgaacgctagcggcaggcttaacacatgcaagtcgaggggcagcgcgggtagcaatacctggcggcgaccggcgaaagggtgcgtaacgcgtgagcaacattcccgtatttgggggataagcagtggaaacgctgtctaataccccataacaacagagtccgcatgaactcagtttaaaagattcgtcgaatacggattggct

SEQ ID NO: 2163 - DNA, 225 bp, Unknown
  bacterial strain Ascusb_1929 encodes 16S rRNA
agagtttgatcatggctcaggataaacgctggcggcgcacataagacatgcaagtcgaacggaagtcgttatactgattttgataagaacggagaacttgttcaaagggacttgatgaagatttataacaatggctttagtggcggactggtgagtaatacgtaagcaacctgcctatcagaggggaacaacagttagaaatgactgctaataccgcatatgcca

SEQ ID NO: 2164 - DNA, 225 bp, Unknown
  bacterial strain Ascusb_1406 encodes 16S rRNA
agagtttgatcatggctcaggacgaacgctggcggcgtgcctaacacatgcaagtcgaacggagttacttgtttagatcccttcggggtgacgaacttttaacttagtggcggacgggtgagtaacgcgtgagtaacctgcctctgagaggggaataacgttctgaaaagatcgctaataccgcataacatatcgaagtcgcatggctttgatatcaaagatttt

SEQ ID NO: 2165 - DNA, 225 bp, Unknown
  bacterial strain Ascusb_726 encodes 16S rRNA
agagtttgatcatggctcaggatgaacgctggcggcgtgcttaacacattcaagtcgaacgatgaagttccttcgggaacggattagtggcggacgggtgagtaacgcgtgagcaacctgccttgcagagggggataacacagggaaacttgtgctaataccgcatgatgcatactgatcgcatgttcggtatgccaaaggagcaatccgctgtaagatgggctc

SEQ ID NO: 2166 - DNA, 225 bp, Unknown
  bacterial strain Ascusb_685 encodes 16S rRNA
agagtttgatcatggctcaggacgaacgctggcggcgtgcctaacacatgcaagtcgagcggagacatgcgacggaactgaagttttcggatggaagtgaagatgtatgttttagcggcggacgggtgagtaacgcgtgaacaatctgtccttcacagggggataacacagcgaaagttgtactaataccgcatgagaccacagtaccgcatggtacaggggtca

SEQ ID NO: 2167 - DNA, 225 bp, Unknown
  bacterial strain Ascusb_265 encodes 16S rRNA
agagtttgatcatggctcaggattaacgctggcggcgtgcctaatacatgcaagtcgaatggtagcaataccatggcgaacgggtgagtaacacgtaggtaacctgtctttaagacgaggataaccgttggaaacgacggataatactcgataggtgattttagggcatcctaggatcattaaagatttatcacttagagaggggcctgcggcgcattagctaga

SEQ ID NO: 2168 - DNA, 225 bp, Unknown
  bacterial strain Ascusb_1790 encodes 16S rRNA
agagtttgatcatggctcaggatgaacgctagcggcaggcctaacacatgcaagtcgaggggcagcgcggggtagcaataccctggcggcgaccggcgcacgggtgcgtaacgcgtatgcaacctgcccgcaacagggggataacggggtgaaaaccccactaataccccgtatggtcatgatttcgcatgggattgtgacgaaagccttggtggttgcggatgg

SEQ ID NO: 2169 - DNA, 225 bp, Unknown
  bacterial strain Ascusb_1253 encodes 16S rRNA
agagtttgatcatggctcaggatgaacgctagcggcaggcttaacacatgcaagtcgaggggtaacagggagtagcaatactctgctgacgaccggcgcacgggtgcgtaacgcgtatgcaacctacctgtaacaggggtataacggagtgaaaattccactaatcccccatattgttagagattcgcatgtttctctaacgaaagcttcggtggttacggatgg

SEQ ID NO: 2170 - DNA, 225 bp, Unknown
  bacterial strain Ascusb_1241 encodes 16S rRNA
agagtttgatcatggctcaggatgaacgctagcggcaggcttaacacatgcaagtcgaggggcagcgcgttgtagcaatacgatggcggcgaccggcggaagggtgcgtaacacgtgagcaacttgcccgcatctggaggaaaagcgatggaaacgtcgtctaatactccataacaacagggaccgcatgatccttgtttgaaagaatttcggatgcggatgggc

SEQ ID NO: 2171 - DNA, 225 bp, Unknown
  bacterial strain Ascusb_2092 encodes 16S rRNA
agagtttgatcatggctcaggatgaacgctggcggcgtgcctaacacatgcaagtcgaacgaagcacttttcccgacaaagaggcgtgcttgcacaaatcggagtcatttaaagtgacttagtggcggacgggtgagtaacgcgtgggtaacctgcctcacacagggggataacagttagaaatgactgctaataccgcataagcgcacggtatcgcatggtaca

SEQ ID NO: 2172 - DNA, 225 bp, Unknown
  bacterial strain Ascusb_18705 encodes 16S rRNA
agagtttgatcctggctcaggatgaacgctggcggcgtgcctaacacatgcaagtcgaacggaacttctttgatagaattcttcggaaggaaattgattaagtttagtggcggacgggtgagtaacgcgtgagtaacctgcctttgagaggggaataacttcccgaaagggatgctaataccgcataacgcatagaagtcgcatggcttatatgccaaagattta

SEQ ID NO: 2173 - DNA, 225 bp, Unknown
  bacterial strain Ascusb_382 encodes 16S rRNA
agagtttgatcatggctcaggatgaacgctagcggcaggcttaacacatgcaagtcgaggggcagcgcgaggtagcaataccttggcggcgaccggcgcaagggtgcgtaacgcgtgagcaatctgcccgtatcagggggataagcgatggaaacgtcgtctaataccgcataacacgttgggaggcatctcccgatgttgaaagcttcggtggatacggatgag

SEQ ID NO: 2174 - DNA, 225 bp, Unknown
  bacterial strain Ascusb_1264 encodes 16S rRNA
agagtttgatcatggctcaggacgaacgctggcggcgtgcctaacacatgcaagtcgaacggaactattttgaaggatctcttcggagtgacggatttttagtttagtggcggacgggtgagtaacgcgtgagtaacctgcctctgagaggggaataacgttctgaaaagaacgctaataccgcataacatatatttgccgcatgacagatatatcaaagatttt

SEQ ID NO: 2175 - DNA, 225 bp, Unknown
  bacterial strain Ascusb_905 encodes 16S rRNA
agagtttgatcatggctcaggatgaacgctggcggcgtgcctaacacattcaagtcgaacggacgcgttcccttcgggggacaagttagtggcggacgggtgagtaatgcatgagcaacctgcctcgaagaggggaataacacagagaaatttgtgctaataccgcataatgtatccgggaggcatcttccggataagaaaggagcaatccgctttgagatgggc

SEQ ID NO: 2176 - DNA, 225 bp, Unknown
  bacterial strain Ascusb_7480 encodes 16S rRNA
agagtttgatcatggctcaggatgaacgctggcggcatgcctaagacatgcaagtcgtacgaggaggcccattgaaatggagtgcttgcacaaagtggatttggattccctcctagtggcggaagggtgagtaatacgtaggttatttgcctcagagactgggataacatgcagaaatgcttgctaataccggatgataaatagaatgatacgttgttctatttt

SEQ ID NO: 2177 - DNA, 225 bp, Unknown
  bacterial strain Ascusb_352 encodes 16S rRNA
agagtttgatcatggctcaggatgaacgctggcggcgcacataagacatgcaagtcgaacgaacttaatcgaaagtttacttttgaagcggttagtggcggactggtgagtaacacgtaagcaacctgcctatcagaggggaataacagtgagaaatcattgctaataccgcatatgctcacagtatcacatgatacagtgaggaaaggagcaatccgctgatag

SEQ ID NO: 2178 - DNA, 225 bp, Unknown
  bacterial strain Ascusb_238 encodes 16S rRNA
agagtttgatcatggctcaggacgaacgctggcggcatgcctaacacatgcaagtcgaacggagctttcgagagcttgcttttgaaagcttagtggcggacgggtgagtaacgcgtgagcaacctgcctttcagtggggaataatattctgaaaagagtactaataccgcataacgtacagaaaccgcatgatttttgtaccaaagatttatcgctgagagatgg

SEQ ID NO: 2179 - DNA, 225 bp, Unknown
  bacterial strain Ascusb_3326 encodes 16S rRNA
agagtttgatcatggctcaggatgaacgctggcggcatgcctaagacatgcaagtcgaacgggatggcccattgaagagtgcgagcttgctcaatctcggatttggattcccatctagtggcgcaagggtgagtaacacgtgggtaacctgccttcgagtctggaataacagttagaaatgattgctaatgccggatgatatgtagaatgatacgtctttctata

SEQ ID NO: 2180 - DNA, 225 bp, Unknown
  bacterial strain Ascusb_10663 encodes 16S rRNA
agagtttgatcatggctcaggatgaacgctagctacaggcttaacacatgcaagtcgaggggcagcataatcgaagcttgctttgattgatggcgaccggcgcacgggtgagtaacgcgtatccaaccttccccatagtagggcatagcccgtagaaatgcggattaataccctatgttttcctttgcaggcatctaacgaggaataaaggttcaccgctatggg

SEQ ID NO: 2181 - DNA, 225 bp, Unknown
  bacterial strain Ascusb_1428 encodes 16S rRNA
agagtttgatcatggctcaggacgaacgctggcggcatgcctaacacatgcaagtcgaacggagttgagagagcttgctttttcaacttagtggcggacgggtgagtaacgcgtgagtaacctgcctttcagtggggaataatattctgaaaagagtactaataccgcataatgtatagaaaccgcatgatttttataccaaagatttatcgctgagagatggac

SEQ ID NO: 2182 - DNA, 225 bp, Unknown
  bacterial strain Ascusb_1720 encodes 16S rRNA
agagtttgatcctggctcaggattaacgctggcggcgtgcctaatacatgcaagtcgaatggtagcaataccatggcgaacgggtgagtaacacgtaggtaacctgtctttaagacgaggataaccgttggaaacgacggataatactcgataggtaattttagggcatcctaggattattaaagatttatcacttagagaggggcctgcggcgcattagctaga

SEQ ID NO: 2183 - DNA, 225 bp, Unknown
  bacterial strain Ascusb_739 encodes 16S rRNA
agagtttgatcatggctcaggacgaacgctggcggcgtgcctaacacatgcaagtcgaacggagttgaggagcttgctccttaacttagtggcggacgggtgagtaacgcgtgagtaacctgcctctgagagtggaataacgttctgaaaagaacgctaataccgcataacatataactgccgcatgacagatatatcaaagattttatcgctcggagatggact

SEQ ID NO: 2184 - DNA, 225 bp, Unknown
  bacterial strain Ascusb_233 encodes 16S rRNA
agagtttgatcatggctcaggacgaacgctggcggcgtgcctaacacatgcaagtcgaacggagttattttgattgattccttcgggatgattgatttttaacttagtggcggacgggtgagtaacgcgtgagtaacctgcctttgagagggggataacgttctgaaaagaacgctaataccgcatgacatatcgaagccgcatgactttgatatcaaagattta

SEQ ID NO: 2185 - DNA, 225 bp, Unknown
  bacterial strain Ascusb_170 encodes 16S rRNA
agagtttgatcatggctcaggacgaacgctggcggcatgcctaacacatgcaagtcgaacggagcttaagaagcttgctttttaagcttagtggcggacgggtgagtaacgcgtgagtaacctgcctcttagtggggaataatgtactgaaaaggacactaataccgcataatgtattgagatcgcatggttttgataccaaagatttatcgctgagagatggac

SEQ ID NO: 2186 - DNA, 225 bp, Unknown
  bacterial strain Ascusb_654 encodes 16S rRNA
agagtttgatcatggctcaggatgaacgctggcggcgtgcctaacacatgcaagtcgaacggaactgcttttgaagattccttcgggatgattcagttgtagtttagtggcggacgggtgagtaacgcgtgagtaacctgcccttcagagggggataacgatctgaaaagaccgctaataccgcataacattacgaagtcgcatggctttgtaatcaaaactcag

SEQ ID NO: 2187 - DNA, 225 bp, Unknown
  bacterial strain Ascusb_318 encodes 16S rRNA
agagtttgatcatggctcaggattaacgctggcggcatgcctaatacatgcaagtcgaatggggagcttgcttcccatggcgaacgggtgagtaatacgtaggtaacctacctttaggacgaggataacctttggaaacgaaggataatactggatagtatagatttccgcatggagatatatttaaagatttatcacctagagaggggcctgcggtgcattagc

SEQ ID NO: 2188 - DNA, 225 bp, Unknown
  bacterial strain Ascusb_3189 encodes 16S rRNA
agagtttgatcatggctcaggataaacgctggcggcgcacataagacatgcaagtcgaacggaagtcgtatgatttgaagttgattgaagatttatcggaaagatgcagattttcatacaatggctttagtggcggactggtgagtaacgcgtgagcaacctgcctattagaggggaataacagtgagaaatcattgctaataccgcatatgctgtgaatatcgc

SEQ ID NO: 2189 - DNA, 225 bp, Unknown
  bacterial strain Ascusb_107 encodes 16S rRNA
agagtttgatcatggctcaggatgaacgctggcggcgtgcctaacacatgcaagtcgaacgaagcatgattgaaggagacttcggtcaatggatatcatgacttagtggcggacgggtgagtaatacatgagcaacctgcctttcagagggggacaacagctggaaacggctgctaataccgcataacgtgcgagaggggcatcccttttgtaccaaaggagcaa

SEQ ID NO: 2190 - DNA, 225 bp, Unknown
  bacterial strain Ascusb_2335 encodes 16S rRNA
agagtttgatcatggctcaggatgaacgctagcggcaggcttaacacatgcaagtcgaggggcagcgcgggtagcaatacctggcggcgaccggcgaaagggtgagtaacgcgtgagcaacgtgcccgtatgtgggggatagtcgatggaaacgtcgcgtaataccccgtaacacatttgaccgcatggtcttatgttgaaagattttattgcatacggatcggc

SEQ ID NO: 2191 - DNA, 225 bp, Unknown
  bacterial strain Ascusb_1495 encodes 16S rRNA
agagtttgatcatggctcaggatgaacgctagcggcaggcttaacacatgcaagtcgaggggtaacaggcggtagcaatactgtgctgacgaccggcgcacgggtgcgtaacgcgtatgcaacctgcctcgcacagggggataacggagtgaaaattccactaatatcccatggtgttggagaatcgcatggttcttcaactaaagcttcggtggtgcgagatgg

SEQ ID NO: 2192 - DNA, 225 bp, Unknown
  bacterial strain Ascusb_408 encodes 16S rRNA
agagtttgatcatggctcaggataaacgctggcggcgcacataagacatgcaagtcgaacggacttaaccgaaagtttacttttggagcggttagtggcggactggtgagtaacgcgtaagcaatctgcctattagaggggaataacagtgagaaatcattgctaataccgcataagctgtgagtatcgcatgatacaaatagaaaaggagtaatccgctaatag

SEQ ID NO: 2193 - DNA, 225 bp, Unknown
  bacterial strain Ascusb_835 encodes 16S rRNA
agagtttgatcatggctcaggacgaacgctggcggcgtgcttaacacatgcaagtcgagcggagttataatgaaagcttgctggatttatgacttagcggcggacgggtgagtaacgcgtgagcaatctgtcccatacagggggataataccgcgaaagaggttctaataccgcatgagaccacggtgaggcatctcgcaggggtcaaaggagcaatccggtatg

SEQ ID NO: 2194 - DNA, 225 bp, Unknown
  bacterial strain Ascusb_147 encodes 16S rRNA
agagtttgatcatggctcaggatgaacgctagcggcaggcctaacacatgcaagtcgaggggcagcggggtgtagcaatacactgccggcgaccggcgcacgggtgcgtaacgcgtatgcaacctacccatgggagggggataacccggagaaatccggactaataccccgtaacacacacattcgcatggaagtgtgttgaaagatacgtcgtccatggacggg

SEQ ID NO: 2195 - DNA, 225 bp, Unknown
  bacterial strain Ascusb_512 encodes 16S rRNA
agagtttgatcctggctcaggacgaacgctggcggcgtgcttaacacatgcaagtcgaacggagttaagcgctggtttgatgctagcttgctagtggatttccttgcttaacttagtggcggacgggtgagtaacgcgtgagtaacctgcctctcagtggggaataacgccctgaaaagagcgctaataccgcataacacatattgaccgcatgatcggtatgtc

SEQ ID NO: 2196 - DNA, 225 bp, Unknown
  bacterial strain Ascusb_3705 encodes 16S rRNA
agagtttgatcatggctcaggatgaacgctggcggcatgcctaagacatgcaagtcgaacgagacgaccttaagaagactgagtgcttgcacgaagttggaagaagatcatcgtctagtggcagacgggtgagtaacacgtgggtaacctacctttaagctggggataacagttggaaacgattgctaataccgaataagatattcgtattgaaagaagccctta

SEQ ID NO: 2197 - DNA, 225 bp, Unknown
  bacterial strain Ascusb_1259 encodes 16S rRNA
agagtttgatcatggctcaggatgaacgctggcggcgtgcctaacacatgcaagtcgaacgaagcatttttcatcggagattcgtcgaagatgagatttgacttagtggcggacgggtgagtaatgtgtgagcaacctgcctttcagagggggacaacagttggaaacgactgctaataccgcataatgtattatggaggcatctcctaaataccaaaggagcaa

SEQ ID NO: 2198 - DNA, 225 bp, Unknown
  bacterial strain Ascusb_607 encodes 16S rRNA
agagtttgatcatggctcaggatgaacgctggcggcgtgcctaacacatgcaagtcgaacggagttacgagagcttgcttttgtaacttagtggcggacgggtgagtaatgcgtgagcaacctgcctttcagagggggacaacagttggaaacgactgctaataccgcataatgtatccgggcggcatcgcctggataccaaaggagcaatccgctgaaagatgg

SEQ ID NO: 2199 - DNA, 225 bp, Unknown
  bacterial strain Ascusb_300 encodes 16S rRNA
agagtttgatcatggctcagaacgaacgctggtggcgtgtcttatacatgcaagtcgagcgaggcagcaatgccgagcggcgaacgggtgagtaacgcgtaagcaatctgccccatatcaggaaatacccgtgccaacgcgcggttaatgtccaggagagtggccttccgcatggagggttgactagagatttatcggtatgggatgagcttgcgtccgattagc

SEQ ID NO: 2200 - DNA, 225 bp, Unknown
  bacterial strain Ascusb_275 encodes 16S rRNA
agagtttgatcctggctcaggataaacgctggcggcgcacataagacatgcaagtcgaacgaacttaacctttagtttactaatggagcggttagtggcggactggtgagtaacacgtaagcaacctgcctatcagaggggaacaacagttagaaatgactgctaataccgcatatgccttgaatatcacatgatataaaagggaaaggagcaatccgctgatag

SEQ ID NO: 2201 - DNA, 225 bp, Unknown
  bacterial strain Ascusb_236 encodes 16S rRNA
agagtttgatcatggctcaggatgaacgctggcggcgtgcttaacacatgcaagtcgaacgagcgtcttcggacgcgagtggcggacgggtgagtaacgcgtgggtaacctaccttatacagggggataacagcgggaaactgctgttaataccgcataagcgcacggaatcgcatgattcagtgtgaaaagctccgacggtataagatggacccgcgtctgatt

SEQ ID NO: 2202 - DNA, 225 bp, Unknown
  bacterial strain Ascusb_3964 encodes 16S rRNA
agagtttgatcatggctcaggatgaacgctggcggcatgcctaagacatgcaagtcgaacgagatggccttttgaaaactgcgtgcttgcacaaagtttgatagagattttccatctagtggcagacgggtgagtaatacataagtaatctaccttaaagactgggataacgtttggaaacgaacgctaataccggatgattcttcttacacaagtaagaaagct

SEQ ID NO: 2203 - DNA, 225 bp, Unknown
  bacterial strain Ascusb_180 encodes 16S rRNA
agagtttgatcatggctcagaacgaacgctggcggcgcgtcttaagcatgcaagtcgagcggtaagatggaagcttgcttctatcctagagcggcggactggtgagtaacgcgtgggtgacgtacccttgtgacggggacagctcctagaaataggagataataccggatacgctgagtgttgtcagaggacattcaggaaaggaacttttgttccgcacgagga

SEQ ID NO: 2204 - DNA, 225 bp, Unknown
  bacterial strain Ascusb_8872 encodes 16S rRNA
agagtttgatcatggctcaggatgaacgctggcggcatgcctaagacatgcaagtcgaacgaagtggcccaatgaagatgaagtgcttgcactgatttggaaatggattcccacttagtggcagacgggtgagtaacacgtgggtaacctaccccttagtctgggacaactattggaaacgatagctaataccggatgattcacagatggataaccatttgtgct

SEQ ID NO: 2205 - DNA, 225 bp, Unknown
  bacterial strain Ascusb_689 encodes 16S rRNA
agagtttgatcctggctcaggatgaacgctagcggcaggcttaacacatgcaagtcgaggggtaacgcgaggtagcaatactttggcgacgaccggcgcacgggtgcgtaacgcgtatgcaacctacctgtaacagggggataacggagggaaacttccactaataccccatattgtcattctttcgcatgttgggatgacgaaagcttcggtggttacggatgg

SEQ ID NO: 2206 - DNA, 225 bp, Unknown
  bacterial strain Ascusb_380 encodes 16S rRNA
agagtttgatcatggctcaggatgaacgctggcggcgtgcttaacacatgcaagtcgaacggagatatttgagagcttgcttttagatatcttagtggcggacgggtgagtaacgcgtgggtaacctaccctgtacagggggatagcagttggaaacgactgataaaaccgcataaaacggcagtaccgcatggtacaaccgtcaaatattcataggtacaggat

SEQ ID NO: 2207 - DNA, 225 bp, Unknown
  bacterial strain Ascusb_19296 encodes 16S rRNA
agagtttgatcctggctcaggatgaacgctagctacaggcttaacacatgcaagtcgaggggaaacggcattttagcttgctaagatggacgtcgaccggcgaatgggtgagtaacgcgtatccaaccttccgttaagtagggaatagccttgcgaaagtaagattaatgccctatgtggtgttttgaggacatctgaagagcaccaaaggttcaccgcttaacg

SEQ ID NO: 2208 - DNA, 225 bp, Unknown
  bacterial strain Ascusb_81 encodes 16S rRNA
agagtttgatcatggctcaggacgaacgctggcggcatgcctaacacatgcaagtcgaacggagttaagagagcttgcttttttaacttagtggcggacgggtgagtaacgcgtgagcaacctgcctttcagtggggaataatgttctgaaaagagcactaataccgcatgaagtatactgatcgcatggtcggaataccaaagatttatcgctgaaagatgggc

SEQ ID NO: 2209 - DNA, 225 bp, Unknown
  bacterial strain Ascusb_1472 encodes 16S rRNA
agagtttgatcatggctcaggatgaacgctggcggcgtgcttaacacatgcaagtcgaacggagctttttttgaaggagacttcggtcaacggaagctaaagcttagtggcggacgggtgagtaacgcgtgagtaacctgcctttcagagggggataacgtttggaaacgaacgctaataccgcatgaaacagcaatactgcatggtataactgtcaaagattat

SEQ ID NO: 2210 - DNA, 225 bp, Unknown
  bacterial strain Ascusb_813 encodes 16S rRNA
agagtttgatcctggctcagaacgaacgctggtggcgtgtcttatacatgcaagtcgagcgaggcagcaatgccgagcggcgaacgggtgagtaacgcgtaagcaatctgccccatatcaggaaatacccgtgccaacgcgcggttaatgtccaggagagtggccttctgcatggaaggttgactagagatttatcggtatgggatgagcttgcgtccgattagc

SEQ ID NO: 2211 - DNA, 225 bp, Unknown
  bacterial strain Ascusb_1395 encodes 16S rRNA
agagtttgatcatggctcaggacgaacgctggcggcgtgcctaacacatgcaagtcgaacggaactgacgccggttcttcggaaccattgtcagtttagtggcggacgggtgagtaacgcgtgagtaacctgcctctgagaggggaataacgttctgaaaagaacgctaataccgcataacatatagaagtcgcatggcttttatatcaaagattttatcgctcg

SEQ ID NO: 2212 - DNA, 225 bp, Unknown
  bacterial strain Ascusb_711 encodes 16S rRNA
agagtttgatcatggctcaggacgaacgctggcggcgcgcctaacacatgcaagtcgaacggagttaaaggagcttgctcttttaacttagtggcggacgggtgagtaacacgtgagcaacctgccttttagtgggggacaacagttggaaacgactgctaataccgcataacgttgcgaggaggcatctccatgcaaccaaagatttatcgctgaaagatgggc

SEQ ID NO: 2213 - DNA, 225 bp, Unknown
  bacterial strain Ascusb_4081 encodes 16S rRNA
agagtttgatcatggctcaggatgaacgctggcggcatgcctaagacatgcaagtcgaacgagatggcccaatgaagatggagtgcttgcacaaagttggatttggattcccgtctagtggcgcaagggtgagtaacacgtgggtaatctaccttcgagtctggaataacagttagaaatgattgctaatgccggatgatatggaaaacgatacgtcattttgta

SEQ ID NO: 2214 - DNA, 225 bp, Unknown
  bacterial strain Ascusb_5136 encodes 16S rRNA
agagtttgatcctggctcaggatgaacgctagcgacaggcctaacacatgcaagtcgaggggcagcgcgagggtagcaatatctttggcggcgaccggcgcacgggtgcgtaacaggtgtgcaatctgtccataatcggggaataacccggcgaaagccgaactaatgctccatgtgagtgagagccgcatgactttcatttgaaacgtaaggattatgggtgag

SEQ ID NO: 2215 - DNA, 225 bp, Unknown
  bacterial strain Ascusb_2961 encodes 16S rRNA
agagtttgatcctggctcaggatgaacgctagctacaggcttaacacatgcaagtcgaggggcagcgggaagttagcttgctaactttgccggcgaccggcgcacgggtgagtaacgcgtatccaaccttccccttagtagggcatagcccgtagaaatgcggattaataccctatgttattcgtcgatgacatctgaagtgaatcaaaggtttaccgctaaggg

SEQ ID NO: 2216 - DNA, 225 bp, Unknown
  bacterial strain Ascusb_537 encodes 16S rRNA
agagtttgatcatggctcaggatgaacgctggcggcgtgcttaatacatgcaagtcgaacggagtttagatgaaacctagtgattctaaacttagtggcggacgggtgagtaacgcgtgggtaacctgccctgtacagggggataacggttggaaacgaccgctaaaaccgcataacatcggaataccgcatgatgttccggtcaaatatttataggtacaggat

SEQ ID NO: 2217 - DNA, 225 bp, Unknown
  bacterial strain Ascusb_543 encodes 16S rRNA
agagtttgatcatggctcaggacgaacgctggcggcatgcctaacacatgcaagtcgaacggagcttaagaagcttgctttttaagcttagtggcggacgggtgagtaacgcgtgagcaacctgcctttcagtggggaataatattctgaaaagagtactaataccgcatgacgtatgacagtcgcatgactgacataccaaagatttatcgctgagagatgggc

SEQ ID NO: 2218 - DNA, 225 bp, Unknown
  bacterial strain Ascusb_441 encodes 16S rRNA
agagtttgatcatggctcaggacgaacgctggcggcatgcctaacacatgcaagtcgaacggagcttaaagagcttgctttttaagcttagtggcggacgggtgagtaacgcgtgagtaacctgcctttcagtggggaataataccttgaaaagggtactaataccgcataatgtacagagatcgcatggtttttgtaccaaagatttatcgctgagagatggac

SEQ ID NO: 2219 - DNA, 225 bp, Unknown
  bacterial strain Ascusb_2606 encodes 16S rRNA
agagtttgatcatggctcagaacgaacgctggcggcgcgtcttaagcatgcaagtcgaacggcaagattggtgcttgcaccgatcctagagtggcggactggtgagtaacgcgtgggtgacttaccctgaagatggggatagccgatagaaatatcggataataccgaataatcttgctggagttagagaccagtaaggaaaggagcttcggctccgcttgagga

SEQ ID NO: 2220 - DNA, 225 bp, Unknown
  bacterial strain Ascusb_560 encodes 16S rRNA
agagtttgatcatggctcaggatgaacgctggcggcgtgcctaatacatgcaagtcgaacgaggtagcaataccgagtggcgaacgggtgagtaacacgtaggtaacctgcccttaagcttgggatacccagaggaaactttggctaataccggataacaacagagaaggcatcttctttgcttgaaaggccccttcaagggtcacttaaggatggacctgcggc

SEQ ID NO: 2221 - DNA, 225 bp, Unknown
  bacterial strain Ascusb_9658 encodes 16S rRNA
agagtttgatcctggctcaggatgaacgctggcggcatgcctaagacatgcaagtcgaacgaagtggcccaatgaagaatgcgagcttgctcaaatttggatttggattcccacttagtggcgcaagggtgagtaacacatgggtaatctaccttcgagtttggaataacagttagaaatgattgctaatgccgaataacattgagaacgatacttcattcttta

SEQ ID NO: 2222 - DNA, 225 bp, Unknown
  bacterial strain Ascusb_3358 encodes 16S rRNA
agagtttgatcatggctcaggatgaacgctggcggcgtgcctaatacatgcaagtcgaacgagggtgcttgcaccctagtggcgaacgggtgagtaacacgtaggtaacctgcccttaagcttgggatacccagaggaaactttggctaataccggataacaacagagaaggcatcttctttgcttgaaaggccctttacggggtcacttaaggatggacctgcg

SEQ ID NO: 2223 - DNA, 225 bp, Unknown
  bacterial strain Ascusb_273 encodes 16S rRNA
agagtttgatcatggctcaggatgaacgctggcggcgtgcttaacacatgcaagtcgaacgggcttagatcggaagcttgcttttgatttaagttagtggcggacgggtgagtaacgcgtgggtaacctaccctgtgcagggggatagcagctggaaacggctgataaaaccgcataacacggcgatgccgcatggcaatgccgtcaaatatttataggcacagg

SEQ ID NO: 2224 - DNA, 225 bp, Unknown
  bacterial strain Ascusb_103 encodes 16S rRNA
agagtttgatcatggctcaggatgaacgctggcggcgtgcttaacacatgcaagtcgaacggaacttaatgaaacctagtgatttaagtttagtggcggacgggtgagtaacgcgtgggtaacctgccgcatgcagggggacaacagagggaaacttctgctaataccgcataagcgcacggggccgcatggccttgtgtgaaaagatttatcggcatgcgatgg

SEQ ID NO: 2225 - DNA, 225 bp, Unknown
  bacterial strain Ascusb_2581 encodes 16S rRNA
agagtttgatcatggctcagaacgaacgctggcggcgcgtcttaagcatgcaagtcgagcggtaagttggaagcttgcttctaacctagagcggcggactggtgagtaacgcgtgggtgacgtacctctgtgacggggacagctcctagaaataggagataataccggatacgctgcatgttgtcagaggacatgcaggaaaggatcttttgattcgcacagaga

SEQ ID NO: 2226 - DNA, 225 bp, Unknown
  bacterial strain Ascusb_1759 encodes 16S rRNA
agagtttgatcatggctcaggacgaacgctggcggcgtgcttaacacatgcaagtcgagcggggacatgagggaataagcttcggcagaaagaatcatgttctagcggcggacgggtgagtaacgcgtgagcaatctgtcccagacagggggataacacttggaaacaggtgctaataccgcataagaccacgaggcggcatcgtcttggggtaaaaggagcaat

SEQ ID NO: 2227 - DNA, 225 bp, Unknown
  bacterial strain Ascusb_823 encodes 16S rRNA
agagtttgatcatggctcaggatgaacgctggcggcgtgcctaatacatgcaagtcgaacgggtgcagcaatgtactagtggcgaacgggtgagtaacacgttggtgacctgccccaaagatgggaatatcacctggaaacgggtggcaaaaccgaataagcttaccccctttagaaaagggtaagtaaaagtgcaaactactttgggaggggcctgcggcccat

SEQ ID NO: 2228 - DNA, 225 bp, Unknown
  bacterial strain Ascusb_1657 encodes 16S rRNA
agagtttgatcatggctcaggatgaacgctggcggcgtgcttaacacatgcaagtcgaacggaactgctttaaatgatttccttcggggatgaatttgttgtagtttagtggcggacgggtgagtaacgcgtgagtaacctgcccttgagagggggataacgttctgaaaagaacgctaataccgcataacattatcgagtcgcatggcttgataatcaaaactg

SEQ ID NO: 2229 - DNA, 225 bp, Unknown
  bacterial strain Ascusb_1018 encodes 16S rRNA
agagtttgatcatggctcaggatgaacgctggcggcgtgcttaacacatgcaagtcgaacgggaattacattttagcttgctaagttgtaattctagtggcggacgggtgagtaacgcgtgggtaacctgccttatacagggggacaacagttggaaacggctgctaataccgcataagcgcacagataggcatctatcagtgtgaaaaactccggtggtataag

SEQ ID NO: 2230 - DNA, 225 bp, Unknown
  bacterial strain Ascusb_6138 encodes 16S rRNA
agagtttgatcatggctcagaacgaacgctggcggcaggcctaacacatgcaagtcgagcgtgaaaggagacttcggtctccgagtaaagcggcgcacgggtgagtaacacgtgaataatctgcccttgtgaccgggataacagatcgaaagaactgctaataccggataagcttccacatcaaccgggtgcgggggaaaagtgcgggaccttcgggccgcacgc

SEQ ID NO: 2231 - DNA, 225 bp, Unknown
  bacterial strain Ascusb_2866 encodes 16S rRNA
agagtttgatcatggctcaggacgaacgctggcggcgtgcttaacacatgcaagtcgaacgaagcttgatgattgatttcttcggaatgatttctgatatgactgagtggcggacgggtgagtaacgcgtgaggaacctgcctttcagagggggacaacgtttggaaacgaacgctaataccgcataacattaccgagtggcatcgcttggtaatcaaagattta

SEQ ID NO: 2232 - DNA, 225 bp, Unknown
  bacterial strain Ascusb_2833 encodes 16S rRNA
agagtttgatcatggctcaggatgaacgctagcggcaggcttaacacatgcaagtcgaggggtaacgcgaggtagcaatactttggcgacgaccggcgcacgggtgcgtaacgcgtatgcaacctacctgtaacagggggataacggagagaaatttccactaataccccatattgtcagagattcgcatgtttctctgacgaaagcttcggtggttacggatgg

SEQ ID NO: 2233 - DNA, 225 bp, Unknown
  bacterial strain Ascusb_35 encodes 16S rRNA
agagtttgatcatggctcagagcgaacgctggcggcaggcttaacacatgcaagtcgagcgggcatagcaatatgtcagcggcagacgggtgagtaacgcgtgggaacgtaccttttggttcggaacaacacagggaaacttgtgctaataccggataagcccttacggggaaagatttatcgccgaaagatcggcccgcgtctgattagctagttggtgaggta

SEQ ID NO: 2234 - DNA, 225 bp, Unknown
  bacterial strain Ascusb_1332 encodes 16S rRNA
agagtttgatcatggctcaggatgaacgctagctacaggcttaacacatgcaagtcgaggggcagcatgatctaagcttgcttagattgatggcgaccggcgcacgggtgagtaacgcgtatccaaccttccctatagtagaggatagcccggcgaaagtcggattaatactctatgttttccaatgcagacatctaagttggaacaaaggttcaccgctatagg

SEQ ID NO: 2235 - DNA, 225 bp, Unknown
  bacterial strain Ascusb_1198 encodes 16S rRNA
agagtttgatcatggctcaggacgaacgctggcggcgtgcttaacacatgcaagtcgaacgaggttataggagagcttgctcgaatataaccgagtggcggacgggtgagtaacgcgtgagcaacctgtctcacacaggggaataacgcatcgaaagatgtgctaataccgcataggaccacggtttcgcatgggactgaggtgaaaggagcaatccggtgtgag

SEQ ID NO: 2236 - DNA, 225 bp, Unknown
  bacterial strain Ascusb_1446 encodes 16S rRNA
agagtttgatcctggctcaggacgaacgctggcggcgtgcctaacacatgcaagtcgaacggaactgttatgattgattcttcggatgaaagagtttcagtttagtggcggacgggtgagtaacgcgtgagtaacctgcctctgagaggggaataacgttctgaaaagaacgctaataccgcataacatagcggagtcgcatggctctgctatcaaagatttatc

SEQ ID NO: 2237 - DNA, 225 bp, Unknown
  bacterial strain Ascusb_5891 encodes 16S rRNA
agagtttgatcatggctcaggatgaacgctggcggcatgcctaagacatgcaagtcgaacgagacgaccttaagaaagctgcgtgcttgcacaaggctggaagaagatcatcgtctagtggcagacgggtgagtaacacgtgggtaacctacctttaagctggggataacagttggaaacgattgctaataccgaataagatattcgtattgaaagaagccctta

SEQ ID NO: 2238 - DNA, 225 bp, Unknown
  bacterial strain Ascusb_1760 encodes 16S rRNA
agagtttgatcatggctcaggacgaacgctggcggcgtgcctaacacatgcaagtcgaacggacgagaggagcttgctcctcaagttagtggcgaacgggtgagtaacgcgtgagcaacctgcctttcagagggggacaacggttggaaacgaccgctaataccgcatgaagcagttggatcgcatgatctggctgccaaagatttatcgctgaaagatgggctc

SEQ ID NO: 2239 - DNA, 225 bp, Unknown
  bacterial strain Ascusb_748 encodes 16S rRNA
agagtttgatcatggctcaggacgaacgctggcggcacgcttaacacatgcaagtcgaacggtgaagtaacttcggttatggaacagtggcggacgggtgagtaacacgtgagcaatctgcctttaagtggggaataacgattggaaacgatcggtaataccgcataatatacataagccgcatgacctatgtatcaaagatttatcgcttaaagatgagctcgc

SEQ ID NO: 2240 - DNA, 225 bp, Unknown
  bacterial strain Ascusb_625 encodes 16S rRNA
agagtttgatcatggctcagagcgaacgctggcggcaggcttaacacatgcaagtcgaacgctcgtcttcggacgggagtggcagacgggtgagtaacacgtgggaacgtaccctttggttcggaataacgcagggaaacttgcgctaataccggatacgcccttttggggaaaggtttactgccgaaggatcggcccgcgtctgattagctagttggtggggta

SEQ ID NO: 2241 - DNA, 225 bp, Unknown
  bacterial strain Ascusb_1210 encodes 16S rRNA
agagtttgatcatggctcaggatgaacgctggcggcgtgcctaacacattcaagtcgaacgaactgtagaaatacagtgagtggcggacgggtgagtaacgcgtaagcaatctgcctttgtgtgtggaataacaaccggaaacagttgctaataccgcataacgcagagggatcgcatggtctttctgccaaagatttatcgcacgaagatgagcttgcgtccga

SEQ ID NO: 2242 - DNA, 225 bp, Unknown
  bacterial strain Ascusb_785 encodes 16S rRNA
agagtttgatcatggctcaggacgaacgctggcggcgtgcctaacacatgcaagtcgagcggacttttattgaaagcttgctggatataagagttagcggcggacgggtgagtaacgcgtgagcaatctgtccctcacagggggataataccgcgaaagtggttctaataccgcatgagaccacggattggcatcgatctggggtcaaaggagcaatccggtgag

SEQ ID NO: 2243 - DNA, 225 bp, Unknown
  bacterial strain Ascusb_5175 encodes 16S rRNA
agagtttgatcctggctcaggatgaacgctagctacaggcttaacacatgcaagtcgaggggtaacgagtgggaagcttgcttcccatgtcgacgaccggcgcacgggtgagtaacgcgtatccaacctgccacatactcggggatagcccggtgaaaaccgaattaatacccgatggcgtcctttgcggacatctaacgaggactaaagattacggtatgtgat

SEQ ID NO: 2244 - DNA, 225 bp, Unknown
  bacterial strain Ascusb_1020 encodes 16S rRNA
agagtttgatcatggctcaggatgaacgctagcggcaggcttaacacatgcaagtcgaggggcagcgtggagtagcaatactctgacggcgaccggcggaagggtgagtaacgcgtgagcaacgtgccgccatctgggggataatcgctggaaacggcgtctaatatcgcgtaacacattgatgggcatccattgatgttgaaagatttatcggatggcgatcgg

SEQ ID NO: 2245 - DNA, 225 bp, Unknown
  bacterial strain Ascusb_11859 encodes 16S rRNA
agagtttgatcatggctcaggatgaacgctggcggcatgcctaagacatgcaagtcgaacgaagtggcccattgataattgagtgcttgcacaagatttgatttggattttccacttagtggcgcaagggtgagtaacacgtaggttatctgccttcgagtctggaataacagttagaaatgattgctaatgccggattatatataaagcaatacgttactttat

SEQ ID NO: 2246 - DNA, 225 bp, Unknown
  bacterial strain Ascusb_885 encodes 16S rRNA
agagtttgatcatggctcaggacgaacgctggcggcatgcctaacacatgcaagtcgaacggagcttaagaggcttgccttttaagcttagtggcggacgggtgagtaacgcgtgagcaacctgcctctcagtggggaataatgtactgaaaaggacactaataccgcatgatgtatttgagtcgcatgatttgaataccaaagatttatcgctgagagatgggc

SEQ ID NO: 2247 - DNA, 225 bp, Unknown
  bacterial strain Ascusb_227 encodes 16S rRNA
agagtttgatcatggctcaggatgaacgctggcggcgtgcctaacacatgcaagtcgaacgaagcatagaagacggagattcgtcaaagccttctatgacttagtggcggacgggtgagtaatgtatgagcaacctgcctttcagagggggacaacagttggaaacgactgctaataccgcataatgtatcgggaggacatcctcctgataccaaaggagcaatc

SEQ ID NO: 2248 - DNA, 225 bp, Unknown
  bacterial strain Ascusb_2296 encodes 16S rRNA
agagtttgatcatggctcaggatgaacgctggcggcgtgcttaacacatgcaagtcgaacgaagcactgggaatgaagttttcggatggatttctctttgacttagtggcggacgggtgagtaacgcgtgggcaacctgccgtatgcagggggacaacagttggaaacggctgctaataccgcataagcgcacggtatcgcatgatacagtgtgaaaagatttat

SEQ ID NO: 2249 - DNA, 225 bp, Unknown
  bacterial strain Ascusb_1458 encodes 16S rRNA
agagtttgatcatggctcaggatgaacgctggcggcgtgcttaacacatgcaagtcgaacggagctttttttgaaggagacttcggtcaacggaagctaaagcttagtggcggacgggtgagtaacgcgtgagtaacctgcctttcagagggggataacatccggaaacggatgctaataccgcataaaacagcagcaccgcatgatgcaactgtcaaagatttt

SEQ ID NO: 2250 - DNA, 225 bp, Unknown
  bacterial strain Ascusb_251 encodes 16S rRNA
agagtttgatcatggctcaggatgaacgctggcggtgtgcctaatacatgcaagtcgatcgggcgtagcaatacgtcagaggcgtacgggtgagtaacacgtaggtaacctacctttaagactgggatacccagacgaaagtttggctaataccggataacaacatttgagacatctcttttgtttgaaaggcgctgcaaggcgccacttttagatggacctgcg

SEQ ID NO: 2251 - DNA, 225 bp, Unknown
  bacterial strain Ascusb_3356 encodes 16S rRNA
agagtttgatcatggctcaggatgaacgctggcggcgtgcctaacacatgcaagtcgaacgaagcatcttatccgacgaagtggagtgcttgcacaaagcagagtcaaccaagatgacttagtggcggacgggtgagtaacgcgtgggtaacctgccgtatacagggggataacagttagaaatgactgctaataccgcataagcgcacggtatcgcatgataca

SEQ ID NO: 2252 - DNA, 225 bp, Unknown
  bacterial strain Ascusb_363 encodes 16S rRNA
agagtttgatcatggctcaggattaacgctggcggcgtgcctaatacatgcaagtcgaatggtagcaataccatggcgaacgggtgagtaacacgtaggtaacctgtctttaagacgaggataaccgttggaaacgacggataatactcgataggtgatttgagggcatccttagatcattaaagatttatcacttagagaggggcctgcggcgcattagctaga

SEQ ID NO: 2253 - DNA, 225 bp, Unknown
  bacterial strain Ascusb_212 encodes 16S rRNA
agagtttgatcatggctcaggatgaacgctggcggcgtgcttaatacatgcaagtcgaacgaagttatctcgctgaggcgagcttgctcaattcttgagataacttagtggcggacgggtgagtaacgcgtgggtaacctgccttacacagggggataacagttagaaatgactgctaataccgcataagcgcacagtatcgcatgatacagtgtgaaaaactcc

SEQ ID NO: 2254 - DNA, 225 bp, Unknown
  bacterial strain Ascusb_630 encodes 16S rRNA
agagtttgatcatggctcaggatgaacgctggcggcatgcctaacacatgcaagtcgaacggagctattatggaagcttgcttttgttttagcttagtggcggacgggtgagtaacgcgtgagaaacctgcccttgagtggggaataacaccgagaaatcggtgctaataccgcataatgtcggaaattcgcatgtttttccgaccaaaggatttattcgcttaa

SEQ ID NO: 2255 - DNA, 225 bp, Unknown
  bacterial strain Ascusb_6714 encodes 16S rRNA
agagtttgatcatggctcaggataaacgctggcggcgcacataagacatgcaagtcgaacggaagtcgttgtaatgatgttgacatgaacagagaacttgttcaacgggatttgatattgacttacaacaatggctttagtggcggactggtgagtaacacgtaagcaacctgcctattagaggggaataacaacgagaaatcgttgctaataccgcatatgcca

SEQ ID NO: 2256 - DNA, 225 bp, Unknown; identical to SEQ ID NO: 2220
  bacterial strain Ascusb_678 encodes 16S rRNA

SEQ ID NO: 2257 - DNA, 225 bp, Unknown
  bacterial strain Ascusb_2067 encodes 16S rRNA
agagtttgatcatggctcaggatgaacgctagcggcaggcttaacacatgcaagtcgaggggcagcgcgggtagcaatacctggcggcgaccggcggaagggtgcgtaacgcgtgagcaacttgcccgtatcagggggataagcattggaaacgatgtctaataccccataacaacagaggctgcatgacctttgtttgaaagtttcggcggatacggataggct

SEQ ID NO: 2258 - DNA, 225 bp, Unknown; identical to SEQ ID NO: 2220
  bacterial strain Ascusb_799 encodes 16S rRNA

SEQ ID NO: 2259 - DNA, 225 bp, Unknown
  bacterial strain Ascusb_3859 encodes 16S rRNA
agagtttgatcatggctcaggataaacgctggcggcgcacataagacatgcaagtcgaacggaagccgtttaaattcaaatgaagtgatttgaggatttatccaatttgaaacgattttgtttttagacatatgactttagtggcggactggtgagtaacgcgtaagcaatctgcctatcagaggggaataacagtgagaaatcattgctaataccgcatatgct

SEQ ID NO: 2260 - DNA, 225 bp, Unknown
  bacterial strain Ascusb_2220 encodes 16S rRNA
agagtttgatcctggctcaggatgaacgctggcggcgtgcctaacacatgcaagtcgaacggagatttaacgctgatgaggcttcggcggaatcttgttaaatcttagtggcggacgggtgagtaacgcgtgggcaacctgcctcgtactgggggataacagttggaaacgactgttaataccgcataagcgcacggtaccgcatggtacagtgtgaaaaactcc

SEQ ID NO: 2261 - DNA, 225 bp, Unknown
  bacterial strain Ascusb_2311 encodes 16S rRNA
agagtttgatcatggctcaggacgaacgctggcggcgtgcctaacacatgcaagtcgaacggactgattcccttcggggatgaaagttagtggcggacgggtgagtaacgcgtgagcaacctgcctttcagaggggaataacgtttggaaacagacgctaataccgcataacgcataggtgtcgcatggcatttatgccaaaggagcaatccgctgaaagatggg

SEQ ID NO: 2262 - DNA, 225 bp, Unknown
  bacterial strain Ascusb_1456 encodes 16S rRNA
agagtttgatcatggctcaggatgaacgctagcggcaggcttaacacatgcaagtcgaggggtaacagggagtagcaatactctgctgacgaccggcgcacgggtgcgtaacgcgtatgcaacctacctgtaacagggggataacggagagaaatttccactaataccccatattgttattctttcgcatgttaggataacgaaagcttcggtggttacggatgg

SEQ ID NO: 2263 - DNA, 225 bp, Unknown
  bacterial strain Ascusb_440 encodes 16S rRNA
agagtttgatcatggctcaggacgaacgctggcggcgtgcctaacacatgcaagtcgaacgaagcatatttctcagagattcgtcgaagagggatatgacttagtggcggacgggtgagtaatgcgtgagcaacctgcccttcggagggggacaacagttggaaacgactgctaataccgcatgatgtgtctgggaggcatctcccggataccaaagattttatc

SEQ ID NO: 2264 - DNA, 225 bp, Unknown
  bacterial strain Ascusb_676 encodes 16S rRNA
agagtttgatcatggctcaggacgaacgctggcggcatgcctaacacatgcaagtcgaacggagtttaagaagcttgctttttaaacttagtggcggacgggtgagtaacgcgtgagcaacctgcctctcagtggggaataatgtactgaaaaggacactaataccgcataaagtaccggagtcgcatggcactggtaccaaagatttatcgctgagagatgggc

SEQ ID NO: 2265 - DNA, 225 bp, Unknown
  bacterial strain Ascusb_3154 encodes 16S rRNA
agagtttgatcctggctcaggatgaacgctagctacaggcttaacacatgcaagtcgaggggcagcgagaagaaagcttgctttctttgtcggcgaccggcgcacgggtgagtaacgcgtatccaaccttccccatagtagggcatagcccgtagaaatgcggattaataccctatgttttccaaagatggcatcagacatggaataaaggtttaccgctatggg

SEQ ID NO: 2266 - DNA, 225 bp, Unknown
  bacterial strain Ascusb_21 encodes 16S rRNA
agagtttgatcctggctcaggatgaacgctagctacaggcttaacacatgcaagtcgaggggtaacgacagcgaaagcttgcttttgctgggcgacgaccggcgcacgggtgagtaacgcgtatccaacctgcccataactaagggataatccgtagaaatgcggtctaataccttatgtgttccgacgaggacatctgaattggaataaagatttatcggttat

SEQ ID NO: 2267 - DNA, 225 bp, Unknown
  bacterial strain Ascusb_1513 encodes 16S rRNA
agagtttgatcctggctcaggatgaacgctggcggcgtgcctaacacatgcaagtcgaacgaagcacttttaccggagattcgtcgaaggtgaatttgacttagtggcggacgggtgagtaatgtatgagcaacctgcctttcagtgggggacaacagttggaaacgactgctaataccgcataacgtatcgagggggcatccccatgataccaaaggagcaatt

SEQ ID NO: 2268 - DNA, 225 bp, Unknown
  bacterial strain Ascusb_12328 encodes 16S rRNA
agagtttgatcatggctcaggatgaacgctggcggcgtgcctaacacatgcaagtcgaacgaagcatatctgacggagattcgtcgaagttgggtatgacttagtggcggacgggtgagtaatgtatgagcaacctgcctttcagagggggacaacagttggaaacgactgctaataccgcataatgtatttgggtggcatcacttggataccaaaggagcaatc

SEQ ID NO: 2269 - DNA, 225 bp, Unknown
  bacterial strain Ascusb_4926 encodes 16S rRNA
agagtttgatcctggctcagaacgaacgctggcggcgcgtcttaagcatgcaagtcgagcggtaagttagtagcttgctactagcctagagcggcggactggtgagtaacgcgtgggtgacgtacctttgtgacggggacagctcctagaaataggagataataccggatacgctgcatgttgtcagaggacatgcaggaaaggatcttttgattcgcacagaga

SEQ ID NO: 2270 - DNA, 225 bp, Unknown
  bacterial strain Ascusb_688 encodes 16S rRNA
agagtttgatcatggctcaggatgaacgctagctacaggcttaacacatgcaagtcgaggggcagcaggaagatgtgcttgcacaactttgctggcgaccggcgcacgggtgagtaacgcgtatccaaccttccctatagtagagaatagcccggcgaaagtcggattaatgctctatgttttccattgatggcatcagatttggaacaaaggttttccgctata

SEQ ID NO: 2271 - DNA, 225 bp, Unknown
  bacterial strain Ascusb_1475 encodes 16S rRNA
agagtttgatcatggctcaggatgaacgctggcggcgtgcctaacacatgcaagtcgaacgaagcgtcccgcccgaagagaaggagtgcttgcacaaatttaattcaattggggcgacttagtggcggacgggtgagtaacgcgtgggtaacctgccttatacagggggataacagttagaaatgactgctaataccgcataagcgcacagaatcgcatgataca

SEQ ID NO: 2272 - DNA, 225 bp, Unknown
  bacterial strain Ascusb_8248 encodes 16S rRNA
agagtttgatcatggctcaggatgaacgctagcgacaggcctaacacatgcaagtcgaggggcagcacgaaggaagcttgctttctttggtggcgaccggcgcacgggtgcgtaacaggtgtgcaatctgtccatagtcggggaatagcccagcgaaagttggattaatgctccatgtgaatcgagaccgcatgattttgatttgaaacgcaaggactatgggtg

SEQ ID NO: 2273 - DNA, 225 bp, Unknown
  bacterial strain Ascusb_2970 encodes 16S rRNA
agagtttgatcatggctcagaacgaacgctggcggcgcgtcttaagcatgcaagtcgagcgggaaatggtagcttgctaccattgagagcggcggactggtgagtaacgcgtgggtgacgtaccctccggacggggatagctcctagaaataggagataataccggatacggtgtcatgtgtcagaggcatgacaggaaagcagcctttgctgcgccggaggagc

SEQ ID NO: 2274 - DNA, 225 bp, Unknown
  bacterial strain Ascusb_3390 encodes 16S rRNA
agagtttgatcatggctcaggataaacgctggcggcgcacataagacatgcaagtcgaacggaagtcgttgtaatgatgttgacatgaacggagaacttgttcaaagagagtgaagattgacttacaacaatggctttagtggcggactggtgagtaatgtataagtaacctgcctatcagaggggaacaacagttggaaacgactgctaataccgcatatgcca

SEQ ID NO: 2275 - DNA, 225 bp, Unknown
  bacterial strain Ascusb_4175 encodes 16S rRNA
agagtttgatcctggctcaggacgaacgctggcggcgtgcttaacacatgcaagtcgagcggggataagctgaatgagagcttcggcaggattatggtttattccagcggcggacgggtgagtaacgcgtgaacaatctgtcccagacagggggataacacttggaaacaggtgctaataccgcataagaccacggcatcgcatggtgcaggggtaaaaggagcg

SEQ ID NO: 2276 - DNA, 225 bp, Unknown
  bacterial strain Ascusb_1268 encodes 16S rRNA
agagtttgatcatggctcagaacgaacgctggcggcgcgtcttaagcatgcaagtcgagcggtaagattggtgcttgcactaatcctagagcggcggactggtgagtaacgcgtgggtgacgtacctctgtgacggggacagctcctagaaataggagataataccggatacgctgtgtgctgtcagagggcacacaggaaaggatcttttgattcgcacagaga

SEQ ID NO: 2277 - DNA, 225 bp, Unknown
  bacterial strain Ascusb_1748 encodes 16S rRNA
agagtttgatcatggctcaggatgaacgctggcggcgtgcctaacacatgcaagtcgaacgaagcatggggatcggagattcgtcgaagggaaccatgacttagtggcggacgggtgagtaatgtatgagcaacctgcctttcagagggggacaacagttggaaacgactgctaataccgcataatgtacggagatggcatcatttttgtaccaaaggagcaatc

SEQ ID NO: 2278 - DNA, 225 bp, Unknown
  bacterial strain Ascusb_1711 encodes 16S rRNA
agagtttgatcatggctcagaacgaacgctggcggcgcgtcttaagcatgcaagtcgagcggtaagttgtagcttgctacaacctagagcggcggactggtgagtaacgcgtgggtgacgtacccttttgacggggatagctcctagaaataggaggtaataccggataagctggcttgtgtcagaggcaagtcaggaaaggttcttttgaaccgcagaaggaac

SEQ ID NO: 2279 - DNA, 225 bp, Unknown
  bacterial strain Ascusb_1942 encodes 16S rRNA
agagtttgatcatggctcaggacgaacgctggcggcgtgcctaacacatgcaagtcgaacggactgattcgcttcggtgatgaaagttagtggcggacgggtgagtaacgcgtgagtaacctgcctttcagagggggataacgtttggaaacgaacgctaataccgcataacatatatttgtcgcatggcagatatatcaaaggagcaatccgctgaaagatgga

SEQ ID NO: 2280 - DNA, 225 bp, Unknown
  bacterial strain Ascusb_1614 encodes 16S rRNA
agagtttgatcatggctcaggatgaacgctagcggcaggcttaacacatgcaagtcgaggggtaacgcggggtagcaatactctggcgacgaccggcgcacgggtgcgtaacgcgtatgcaacctacctgtaacagggggataacggagggaaacttccactaataccccatattgtcattgattcgcatgtttcgatgacgaaagcttcggtggttacggatgg

SEQ ID NO: 2281 - DNA, 225 bp, Unknown
  bacterial strain Ascusb_116 encodes 16S rRNA
agagtttgatcatggctcagattgaacgctggcggcaggcctaatacatgcaagtcgaacggtaacatggaagtagcaatacttttgatgacgagtggcggacgggtgagtaatatttgggaatctacctatcagagggggatagcaactggaaacggttgataagaccgcgtacgctctgaggaggaaagtaatgggatcgaaagaccattagctgatagatga

SEQ ID NO: 2282 - DNA, 225 bp, Unknown
  bacterial strain Ascusb_1690 encodes 16S rRNA
agagtttgatcatggctcaggatgaacgctagcggcaggcttaacacatgcaagtcgaggggcagcgggttgtagcaatacgatgccggcgaccggcgaaagggtgagtaacgcgtgagcaacgtgccttcatcagggggatagtcgatggaaacgtcgtgtaataccccgtaacactgtttatcgcatggtaggcagttgaaagatttattggatggagatcgg

SEQ ID NO: 2283 - DNA, 225 bp, Unknown
  bacterial strain Ascusb_494 encodes 16S rRNA
agagtttgatcatggctcaggatgaacgctagctacaggcttaacacatgcaagtcgtggggcagcatgaaggaagcttgcttcctttgatggcgaccggcgcacgggtgagtaacgcgtatccaacctgcctgatactcgggtatagcccagtgaaaactggattaacccccgatgtggtcctttgcagacatctaattaggattaaagtttacggtatcggat

SEQ ID NO: 2284 - DNA, 225 bp, Unknown
  bacterial strain Ascusb_1959 encodes 16S rRNA
agagtttgatcatggctcaggacgaacgctggcggcgtgcctaacacatgcaagtcgaacggacgaggggagcttgctccctgagttagtggcgaacgggtgagtaacgcgtgagcaacctgcctttcagagggggacaacggttggaaacgaccgctaataccgcatgaaacattctgaccgcatgattggaatgtcaaagattttatcgctgaaagatgggct

SEQ ID NO: 2285 - DNA, 225 bp, Unknown
  bacterial strain Ascusb_778 encodes 16S rRNA
agagtttgatcatggctcaggatgaacgctggcggcgtgcctaacacatgcaagtcgaacggaactgattttgaagattccttcgggatgattcagttttagtttagtggcggacgggtgagtaacgcgtgagtaacctgcccttgagagggggataacgttctgaaaaggacgctaataccgcataacattacggaatcgcatggttcagtaatcaaaactccg

SEQ ID NO: 2286 - DNA, 225 bp, Unknown
  bacterial strain Ascusb_418 encodes 16S rRNA
agagtttgatcatggctcaggataaacgctggcggcgcacataagacatgcaagtcgaacgaacttaatcttttagtttactattagaagcggttagtggcggactggtgagtaacgcgtaagcaatctgcctatcagaggggaacaacagtgagaaatcactgctaataccgcatatgctgtgagtacggcatcgtacaaacaggaaaggagcaatccgctgat

SEQ ID NO: 2287 - DNA, 225 bp, Unknown
  bacterial strain Ascusb_482 encodes 16S rRNA
agagtttgatcatggctcaggacgaacgctggcggcgtgcctaacacatgcaagtcgaacggagttgttttgaatgaagttttcggatggattttaaaataacttagtggcggacgggtgagtaacgcgtgagtaacctgccgataagagggggataacgtcttgaaaaggacgctaataccgcatgacgtattgaagccgcatgactttaataccaaaggagca

SEQ ID NO: 2288 - DNA, 225 bp, Unknown
  bacterial strain Ascusb_1511 encodes 16S rRNA
agagtttgatcatggctcagaacgaacgctggcggcgcgtcttaagcatgcaagtcgaacggcaagattggtgcttgcaccgatcctagagtggcggactggtgagtaacgcgtgggtgatttaccctgaagatggggatagccgatagaaatatcggataataccgaatacgcttggtgaggttagagtgcatcaaggaaaggagcttcggctccgcttcagga

SEQ ID NO: 2289 - DNA, 225 bp, Unknown
  bacterial strain Ascusb_2723 encodes 16S rRNA
agagtttgatcatggctcaggatgaacgctagcggcaggcttaacacatgcaagtcgaggggcagcgcgaggtagcaatactttggcggcgaccggcgaaagggtgcgtaacgcgtgagcaacttgcccgtatctgggacataagcggtggaaacgccgtctaatttcccataacaacagaggccgcatgacatctgtttgaaagatccgtcggatacggatggg

SEQ ID NO: 2290 - DNA, 225 bp, Unknown
  bacterial strain Ascusb_3918 encodes 16S rRNA
agagtttgatcctggctcaggacgaacgctggcggcgtgcttaacacatgcaagtcgaacggagttatattggatgagagcttcggcaggattgcgatataacttagtggcggacgggtgagtaacgcgtgagcaacctgtcccagacagggggataacacttggaaacaggtgctaataccgcataagaccacggcatcacatggtgcaggggtaaaaggtgta

SEQ ID NO: 2291 - DNA, 225 bp, Unknown
  bacterial strain Ascusb_841 encodes 16S rRNA
agagtttgatcatggctcaggacgaacgctggcggcacgcttaacacatgcaagtcgaacggagttttggagcttgctccaaaacttagtggcggacgggtgagtaacacgtgagcaacctacctctgagagcggaatagcttctggaaacggatggtaataccgcatgacattgtgaagccgcatgactttacaatcaaatgaatttcgctcagagatgggctc

SEQ ID NO: 2292 - DNA, 225 bp, Unknown
  bacterial strain Ascusb_1024 encodes 16S rRNA
agagtttgatcatggctcaggattaacgctggcggcgtgcctaatacatgcaagtcgaatggtagcaataccatggcgaacgggtgagtaacacgtaggtaacctgtccttaagacgaggataaccattggaaacgatggataatactggataggagtggttgaggcatcttgatcactttaaagatttatcacttgaggaggggcctgcggcgcattagctaga

SEQ ID NO: 2293 - DNA, 225 bp, Unknown
  bacterial strain Ascusb_1212 encodes 16S rRNA
agagtttgatcatggctcaggatgaacgctagcggcaggcttaacacatgcaagtcgaggggcagcggggagtagcaatactctgccggcgaccggcggaagggtgcgtaacgcgtgagcaacttgcccgtatccgggacataagcggtggaaacgccgtctaatttcccataacaacgaggatcgcatggtccatgtttgaaagacacgtcggatacggatggg

SEQ ID NO: 2294 - DNA, 225 bp, Unknown
  bacterial strain Ascusb_1558 encodes 16S rRNA
agagtttgatcatggctcaggatgaacgctggcggcgtgcctaacacatgcaagtcgaacgaagcacctcgcccgatgaagaggagagcttgctcaaatcggaatcaattgaggtgacttagtggcggacgggtgagtaacgcgtgggtaacctgccgtatacagggggataacagttagaaatgactgctaataccgcataagcgcacggtatcgcatgataca

SEQ ID NO: 2295 - DNA, 225 bp, Unknown
  bacterial strain Ascusb_206 encodes 16S rRNA
agagtttgatcatggctcaggatgaacgctggcggcgtgcttaacacatgcaagtcgaacggagttttgatgtgagcgagaggtagcttgctattaatcaatcttttcaaaacttagtggcggacgggtgagtaacgcgtgggtaacctgccctgtacagggggataacagttggaaacgactgctaacaccgcataacatcgcgagggcgcatgaccttgcgat

SEQ ID NO: 2296 - DNA, 225 bp, Unknown
  bacterial strain Ascusb_2341 encodes 16S rRNA
agagtttgatcatggctcaggatgaacgctagctacaggcttaacacatgcaagtcgaggggcatcgggaagttagcttgctaactttgccggcgaccggcgcacgggtgagtaacgcgtatccaaccttccccttagtagggcatagcccggcgaaagtcggattaataccctatgttcttcgtcgaggacatctgaagtgaagcaaagacttgtcgctaaggg

SEQ ID NO: 2297 - DNA, 225 bp, Unknown
  bacterial strain Ascusb_649 encodes 16S rRNA
agagtttgatcatggctcaggacgaacgctggcggcgtgcttaacacatgcaagtcgaacgaggttagattgagagcttgctcttgagataaccgagtggcggacgggtgagtaacgcgtgagcaacctgtctcacacagggggataacgcatcgaaaggtgtgctaataccgcataagaccacagggggacatcctccaggggtcaaaggagcaatccggtgtg

SEQ ID NO: 2298 - DNA, 225 bp, Unknown
  bacterial strain Ascusb_1931 encodes 16S rRNA
agagtttgatcatggctcagaacgaacgctggcggcgcgtcttaagcatgcaagtcgagcggtaagatagtagcttgctattatcctagagcggcggactggtgagtaacgcgtgggtgacgtaccctttggacggggatagcctgtggaaacacagggtaataccggatacggtcgcatatgtcagaggtatgcgaggaaaggttcttttgaaccgccgaagga

SEQ ID NO: 2299 - DNA, 225 bp, Unknown
  bacterial strain Ascusb_964 encodes 16S rRNA
agagtttgatcatggctcaggatgaacgctggcggcgtgcctaacacatgcaagtcgaacgaagcatacggactggagattcgtcgaaggactgtatgacttagtggcggacgggtgagtaatgtatgagcaacctgcctttcagagggggacaacagttggaaacgactgctaataccgcgtaacgtatcgtgagggcatcctcgtgataccaaaggagcaatc

SEQ ID NO: 2300 - DNA, 225 bp, Unknown
  bacterial strain Ascusb_419 encodes 16S rRNA
agagtttgatcctggctcagaataaacgctggcggcgtgcctaacacatgcaagtcgaacggatgaagggagcaatccccgattcagtggcggacgggttagtaacgcgtgaggaacctgcctttcagagggggatagcagttggaaacgactgataataccgcataagaccacagcgccgcatgacgcaggggtcaaaggagcaatccgctgaaagatggactc

SEQ ID NO: 2301 - DNA, 225 bp, Unknown
  bacterial strain Ascusb_2947 encodes 16S rRNA
agagtttgatcctggctcaggatgaacgctggcggcgtgcctaacacatgcaagtcgaacggaactgcgataatatgaactcttcggagggacttgttcgtagtttagtggcggacgggtgagtaacgcgtgagtaacctgcccttgagagggggataacgttctgaaaagaacgctaataccgcataatattatcgagtcgcatggcttgataatcaaaactcc

SEQ ID NO: 2302 - DNA, 225 bp, Unknown
  bacterial strain Ascusb_2594 encodes 16S rRNA
agagtttgatcatggctcagaacgaacgctggcggcgcgtcttaagcatgcaagtcgaatggcaagataagagcttgctcttatcctagaatggcggactggtgagtaacgcgtgggtgacgtaccctttagacggggatagctcctagaaataggagataataccggataagctccacattgttagagggtgtggaggaaaggttcttttgaaccgctgaagga

SEQ ID NO: 2303 - DNA, 225 bp, Unknown
  bacterial strain Ascusb_821 encodes 16S rRNA
agagtttgatcatggctcaggacgaacgctggcggcgtgcctaatacatgcaagtcgaacggagttagagacttcggtttttaacttagtggcgaacgggtgagtaacgcgtgagcaacctgactcaaagagggggacaacagctggaaacggctgctaataccgcataagaccacagggaggcatcttctaggggtcaaagaaattcgctttgagaggggctcg

SEQ ID NO: 2304 - DNA, 225 bp, Unknown
  bacterial strain Ascusb_533 encodes 16S rRNA
agagtttgatcatggctcaggatgaacgctggcggcgtgcctaacacatgcaagtcgaacggaaagctaccgcttcggagacttcggtcaatgtttggtagtttttagtggcggacgggtgagtaacgcgtggataacctgccatatacagggggataacagttagaaatgactgctaataccgcataagcgcacggaaacgcatgtttcagtgtgaaaaactcc

SEQ ID NO: 2305 - DNA, 225 bp, Unknown
  bacterial strain Ascusb_447 encodes 16S rRNA
agagtttgatcatggctcaggacgaacgctggcggcgtgcctaacacatgcaagtcgaacggagttatgtcacgaagttcttcggagcggacgacatagcttagtggcggacgggtgagtaacgcgtgagcaacctgcctttcagagggggacaacggttggaaacgaccgctaataccgcatgaaatgactggaccgcatgatccggtcatcaaagattttatc

SEQ ID NO: 2306 - DNA, 225 bp, Unknown
  bacterial strain Ascusb_412 encodes 16S rRNA
agagtttgatcatggctcaggatgaacgctggcggcgtgcttaacacatgcaagtcgaacgaagctctttgaactgaggattcgtctgaagtgatgagaagacttagtggcggacgggtgagtaacgcgtgggtaacctgccgtatgcagggggacaacagttggaaacgactgctaataccgcataagcgcacggtattgcatgatacagtgtgaaaagattta

SEQ ID NO: 2307 - DNA, 225 bp, Unknown
  bacterial strain Ascusb_1588 encodes 16S rRNA
agagtttgatcatggctcaggatgaacgctagcggcaggcttaacacatgcaagtcgaggggcagcgcgaggtagcaataccttggcggcgaccggcgcacgggtgcgtaacgcgtatgcaacctacccactacagggggataacggagggaaacttccactaatatcccatggtgtcaccgaatcgcatggtttggtgactaaagcttcggtggtagtggatgg

SEQ ID NO: 2308 - DNA, 225 bp, Unknown
  bacterial strain Ascusb_14763 encodes 16S rRNA
agagtttgatcctggctcaggatgaacgctagctacaggcttaacacatgcaagtcgaggggtaacgacagcgaaagcttgcttttgctgggcgacgaccggcgaatgggtgagtaacgcgtatccaacctgccgcaaagtagggcacagccttgcgaaagtaagattaatgccctatgtgctgtgatgatgacatcagaattgcagtaaaggttcaccgctttg

SEQ ID NO: 2309 - DNA, 225 bp, Unknown
  bacterial strain Ascusb_431 encodes 16S rRNA
agagtttgatcctggctcaggacgaacgctggcggcgtgcctaacacatgcaagtcgaacggacgaggggagcttgctccccgagttagtggcgaacgggtgagtaacgcgtgagcaacctgcctttcagagggggacaacggttggaaacgaccgctaataccgcatgaagcaatcggaccgcatgatctgattgccaaagattttatcgctgaaagatgggct

SEQ ID NO: 2310 - DNA, 225 bp, Unknown
  bacterial strain Ascusb_3884 encodes 16S rRNA
agagtttgatcatggctcaggacgaacgctggcggcgtgcttaacacatgcaagtcgaacgaagcagcagtgaaggaggcttcggccaatggatctgttgacttagtggcggacgggtgagtaacgcgtgagcaacctgcctttcagagggggataacgtttggaaacgaacgctaataccgcatgaagtatttccgctgcatgacggagataccaaaggagcaa

SEQ ID NO: 2311 - DNA, 225 bp, Unknown
  bacterial strain Ascusb_3342 encodes 16S rRNA
agagtttgatcatggctcaggacgaacgctggcggcgtgcctaacacatgcaagtcgagcggggacatgagacggaggatgaagatttcggttggagttcgaagacttatgttctagcggcggacgggtgagtaacgcgtgagcaacctgtcccttacagggggataacacagcgaaagttgtactaataccgcataagaccacgacggggcatcccggaggggt

SEQ ID NO: 2312 - DNA, 225 bp, Unknown
  bacterial strain Ascusb_1566 encodes 16S rRNA
agagtttgatcatggctcaggatgaacgctggcggcgtgcctaacacatgcaagtcgaacgaagcacttctgaacagagattcgtcgaagtttggatttgacttagtggcggacgggtgagtaatgtatgagcaacctgcctttcggagggggacaacagttggaaacgactgctaataccgcataatgtatcgagggggcatccccatgataccaaaggagcaa

SEQ ID NO: 2313 - DNA, 225 bp, Unknown
  bacterial strain Ascusb_2255 encodes 16S rRNA
agagtttgatcatggctcaggatgaacgctagctacaggcttaacacatgcaagtcgaggggcagcattatcgaagcttgctttgatagatggcgaccggcgcacgggtgagtaacgcgtatccaaccttcccatcactcagggatagcccgccgaaaggcgaattaatacctgatggtctccttcgcggacatctaacgaggagtaaagatttattggtgatgg

SEQ ID NO: 2314 - DNA, 225 bp, Unknown
  bacterial strain Ascusb_3855 encodes 16S rRNA
agagtttgatcctggctcaggatgaacgctagctacaggcttaacacatgcaagtcgaggggcagcatggagattgcttgcaatttctgatggcgaccggcgcacgggtgagtaacgcgtatccaacctgcctgcaagtagggaatagcccggagaaattcggattaatgccctatgtggccctttgatgacatctgaagagggttaaagattaattgcttgcgg

SEQ ID NO: 2315 - DNA, 225 bp, Unknown
  bacterial strain Ascusb_2223 encodes 16S rRNA
agagtttgatcatggctcaggatgaacgctggcggcgtgcataacacattcaagtcgaacgaagcgtatggaatgagatcttcggatcaagtgaaatacgacttagtggcggacgggtgagtaacgcgtgagcaaccttcctgcctgtgagggataacacagggaaacttgtgctaataccgcatgacgtatggagatcgcatggtcatcataccaaagatatat

SEQ ID NO: 2316 - DNA, 225 bp, Unknown
  bacterial strain Ascusb_721 encodes 16S rRNA
agagtttgatcatggctcaggacgaacgctggcggcacgcctaacacatgcaagtcgaacggtgttgatttgagtttacttagatcaacatagtggcggacgggtgagtaacacgtgagcaacctgccttttggcgagggatagcttctggaaacggatggtaatacctcataatatagctgagtcgcatggcttggttatcaaagaatttcgccaaaagatggg

SEQ ID NO: 2317 - DNA, 225 bp, Unknown
  bacterial strain Ascusb_459 encodes 16S rRNA
agagtttgatcatggctcaggatgaacgctggcggcgtgcataacacattcaagtcgaacggtgaagtaccttcgggtgcggatcagtggcggacgggtgagtaacgcgtgagcaacctgccctggattgagggataacacagggaaacttgtgctaatacctcatgacgtatacttatcgcatgttaggtataccaaagatttattgatacaggatgggctcgc

SEQ ID NO: 2318 - DNA, 225 bp, Unknown
  bacterial strain Ascusb_1882 encodes 16S rRNA
agagtttgatcatggctcaggatgaacgctggcggcgtgcctaatacatgcaagtcgaacgagggtacttgtacccgagtggcgaacgggtgagtaacacgtaggtaacctgccttttagtttgggatacccagaggaaactttggctaataccggatatgaatttgagaggcatctctcgaatttgaaaggagcgtttgctccgctttaagatggacctgcggc

SEQ ID NO: 2319 - DNA, 225 bp, Unknown
  bacterial strain Ascusb_731 encodes 16S rRNA
agagtttgatcatggctcaggacgaacgctggcggcacgcctaacacatgcaagtcgaacggtgtcaattgagcttgcttaattgacatagtggcggacgggtgagtaacacgtgagcaacctgcctttcagagagggatagcttccggaaacggatggtaatacctcatgacatagatgagccgcatgacttatctatcaaagatttatcactgagagatgggc

SEQ ID NO: 2320 - DNA, 225 bp, Unknown
  bacterial strain Ascusb_2179 encodes 16S rRNA
agagtttgatcctggctcaggataaacgctggcggcgcacataagacatgcaagtcgaacggaagccgttataaaaaagattgaagatttatctgattgaagttttataacaatgactttagtggcggactggtgagtaatacatgagcaacctgcctattagaggggaacaacagttagaaatgactgctaataccgcatatgccatatgaatcacatggttca

SEQ ID NO: 2321 - DNA, 225 bp, Unknown
  bacterial strain Ascusb_991 encodes 16S rRNA
agagtttgatcatggctcaggatgaacgctagcggcaggcttaacacatgcaagtcgaggggcagcgggggtagcaatacccgccggcgaccggcgaaagggtgcgtaacgcgtgagcaacctgcccgcatccggggcataagcggtggaaacgccgtctaatttcccataacaacgagggccgcatgacccacgtttgaaagatccgtcggatgcggatgggct

SEQ ID NO: 2322 - DNA, 225 bp, Unknown
  bacterial strain Ascusb_6352 encodes 16S rRNA
agagtttgatcctggctcaggatgaacgctggcggcatgcctaagacatgcaagtcgaacgaggtgccccattgaagatgaagtgcttgcactgatttggatttggatcagcacctagtggcggacgggtgagtaacacgtgggtgatctacccttaagactggaatacctattggaaacgatagttaataccggataacacattaattcgttttaatgttgaaa

SEQ ID NO: 2323 - DNA, 225 bp, Unknown
  bacterial strain Ascusb_1017 encodes 16S rRNA
agagtttgatcatggctcaggatgaacgctggcggcgtgcttaacacatgcaagtcgaacgggaattacttttaagcttgcttagttgtaattctagtggcggacgggtgagtaacgcgtgggtaacctgccttataccgggggacaacagttggaaacgactgctaataccgcataagcgcacagacaggcatctgtcagtgtgaaaaactccggtggtataag

SEQ ID NO: 2324 - DNA, 225 bp, Unknown
  bacterial strain Ascusb_871 encodes 16S rRNA
agagtttgatcatggctcaggacgaacgctggcggcacgcttaacacatgcaagtcgaacgaacggagatagcttgctatcgaagttagtggcggacgggtgagtaacacgtgagcaatctgcctttaagtggggaataacggctggaaacgaccggtaataccgcataaaatacaggaaccgcatgatttttgtatcaaagatttatcgcttaaagatgagctc

SEQ ID NO: 2325 - DNA, 225 bp, Unknown
  bacterial strain Ascusb_3112 encodes 16S rRNA
agagtttgatcatggctcaggataaacgctggcggcgcacataagacatgcaagtcgaacggaagtcgttgtaatgatgtggaaatgaacggagaacttgttcaaagagagtggaaattgacttacaacaatggctttagtggcggactggtgagtaatgtataagtaacctgcctatcagaggggaacaacagttagaaatgactgctaataccgcatatgcca

SEQ ID NO: 2326 - DNA, 225 bp, Unknown
  bacterial strain Ascusb_1912 encodes 16S rRNA
agagtttgatcatggctcaggatgaacgctggcggcgtgcctaacacatgcaagtcgaacgaagcgtcccgcccgaagatgaggagtgcttgcacaaatctgattcaattgggatgacttagtggcggacgggtgagtaacgcgtgggtaacctgccttatacagggggataacagttagaaatgactgctaataccgcataagcgcacagtatcgcatgataca

SEQ ID NO: 2327 - DNA, 225 bp, Unknown
  bacterial strain Ascusb_19080 encodes 16S rRNA
agagtttgatcctggctcaggatgaacgctagctacaggcttaacacatgcaagtcgaggggcagcatgatcaaagcttgctttggttgatggcgaccggcgcacgggtgagtaacgcgtatccaaccttccccttagtagggcatagcccgtagaaatgcggattaataccctatgttgttcgtagaggacatctgaaatgaaccaaaggtttaccgctaaggg

SEQ ID NO: 2328 - DNA, 225 bp, Unknown
  bacterial strain Ascusb_1091 encodes 16S rRNA
agagtttgatcctggctcaggatgaacgctagctacaggcttaacacatgcaagtcgaggggcagcatgatcaaagcttgctttgattgatggcgaccggcgcacgggtgagtaacgcgtatccaaccttccccttagtagggcatagcccggcgaaagtcggattaataccctatgttattcgtcgaggacatctgaagtgaatcaaagatttatcgctaaggg

SEQ ID NO: 2329 - DNA, 225 bp, Unknown
  bacterial strain Ascusb_2923 encodes 16S rRNA
agagtttgatcatggctcaggatgaacgctagcggcaggcttaacacatgcaagtcgaggggcagcgcgggagtagcaatacttctggcggcgaccggcgcaagggtgcgtaacgcgtgagcaacatacccgtcacagggggataagcgatggaaacgtcgtctaataccgcataaaacttagggcggcatcgtccggagttgaaacttacgagggtgacggatt

SEQ ID NO: 2330 - DNA, 225 bp, Unknown
  bacterial strain Ascusb_9969 encodes 16S rRNA
agagtttgatcctggctcaggacgaacgctggcggcatgcctaacacatgcaagtcgaacggagttttggagcttgctccaaaacttagtggcggacgggtgagtaacgcgtgagtaacctgcctttcagtggggaataatattctgaaaagagtactaataccgcataacatacagaagtcgcatggcttttgtatcaaagatttatcgctgaaagatggactc

SEQ ID NO: 2331 - DNA, 225 bp, Unknown
  bacterial strain Ascusb_3082 encodes 16S rRNA
agagtttgatcatggctcaggatgaacgctggcggcgtgcctaacacatgcaagtcgaacgaagcttgagaaatgatttcttcggaatgaattttgatatgacttagtggcggacgggtgagtaacacgtgagcaacctgcctttcagagggggataacggctggaaacggtcgctaataccgcatgatgtatcgaaatggcatcattttgataccaaaggagca

SEQ ID NO: 2332 - DNA, 225 bp, Unknown
  bacterial strain Ascusb_6001 encodes 16S rRNA
agagtttgatcatggctcaggacgaacgctggcggcgtgcttaacacatgcaagtcgaacgaagcgacagtgaaggaggcttcggccaatggatctgttgacttagtggcggacgggtgagtaacgcgtgagcaacctgcctttcagagggggataacgtttggaaacgaacgctaataccgcatgacgtatctttgctgcatgacagagataccaaaggagcaa

SEQ ID NO: 2333 - DNA, 225 bp, Unknown
  bacterial strain Ascusb_5462 encodes 16S rRNA
agagtttgatcatggctcagaacgaacgctggcggcgcgtcttaagcatgcaagtcgaatggcaagatcggtgcttgcactgatcctagaatggcggactggtgagtaacgcgtgggtgacgtaccttttggatggggatagctcctggaaacaggagataataccgaatacgctgcatgggaacagaggccatgcaggaaagtatcttttgatacgccgaaaga

SEQ ID NO: 2334 - DNA, 225 bp, Unknown
  bacterial strain Ascusb_2725 encodes 16S rRNA
agagtttgatcatggctcaggattaacgctggcggcatgcctaatacatgcaagtcgaatggaagagcttgcttttccatggcgaacgggtgagtaacacgtaggtaacctaccttaaggacgaggataacctttggaaacgaaggataatactggataggacatcacaaaacacatgtttagatgtttaaaggagcaatccaccataagaggggcctgcggcgc

SEQ ID NO: 2335 - DNA, 225 bp, Unknown
  bacterial strain Ascusb_3509 encodes 16S rRNA
agagtttgatcatggctcaggataaacgctggcggcgtgcttaacacatgcaagtcgaacggagtatttctcccgagaccgaggaagcttgcttccgaagaatcatttgaaatacttagtggcggacgggtgagtaacgcgtgggtaacctgcctcacactgggggatagcagttggaaacgactgataataccgcataagcgcacaataccgcatggtatggtg

SEQ ID NO: 2336 - DNA, 225 bp, Unknown
  bacterial strain Ascusb_2285 encodes 16S rRNA
agagtttgatcatggctcagaacgaacgctggcggcgcgtcttaagcatgcaagtcgagcggtaagttggaagcttgcttctaacctagagcggcggactggtgagtaacgcgtgggtgacgtacccttgtgacggggacagctggtagaaatatcagataataccggatacgctgagtgttgtcagaggacactcaggaaaggaacttttgttccgcacaagga

SEQ ID NO: 2337 - DNA, 225 bp, Unknown
  bacterial strain Ascusb_3560 encodes 16S rRNA
agagtttgatcctggctcaggatgaacgctagctacaggcttaacacatgcaagtcgaggggcagcattgagatagcttgctatttcagatggcgaccggcgcacgggtgagtaacgcgtatccaaccttccccttagtagaggatagcccggcgaaagtcggattaatactctatgttgtattttgaggacatctgacgaataccaaagattcatcgctaaggg

SEQ ID NO: 2338 - DNA, 225 bp, Unknown
  bacterial strain Ascusb_1545 encodes 16S rRNA
agagtttgatcatggctcaggacgaacgctggcggcgtgcctaacacatgcaagtcgaacggagttatgttacgaagctcttcggaacggacgacatagcttagtggcggacgggtgagtaacgcgtgagcaacctgcctttcagagggggacaacggttggaaacgaccgctaataccgcatgaaatgatcggaccgcatgatctggtcatcaaagatttatcg

SEQ ID NO: 2339 - DNA, 225 bp, Unknown
  bacterial strain Ascusb_804 encodes 16S rRNA
agagtttgatcatggctcaggatgaacgctagcgacaggcctaacacatgcaagtcgaggggcagcgcgggagaagcttgcttttcctggcggcgaccggcgcacgggtgcgtaacaggtgtgcaatctgtccatagtcgggggatagcccagcgaaagctgaattaatactccatgtgaatcgaagccgcatgactttgatttgaaacgcgaggactatgggtg

SEQ ID NO: 2340 - DNA, 225 bp, Unknown
  bacterial strain Ascusb_3019 encodes 16S rRNA
agagtttgatcctggctcagaacgaacgctggcggcgcgtcttaagcatgcaagtcgagcggcaagatatcttcgggtatcctagagcggcggactggtgagtaacacgtagatgacgcacccttctgacggggatagcctgtggaaacacagggtaataccggataagcccgtggggattggaagcttacggggaaaggaactattgttccgcgggaggagcgg

SEQ ID NO: 2341 - DNA, 225 bp, Unknown
  bacterial strain Ascusb_3810 encodes 16S rRNA
agagtttgatcctggctcaggatgaacgctggcggcgtgcctaatacatgcaagtcgaacgagaagtcttcggacttcgagtggcgaacgggtgagtaacacgtattcaatctgccctaacgactgggataccctcgggaaaccttggctaataccggataggaattttgatcgcatgatcgaaattttaaaggatcttttgattcacgataggatgagaatgcg

SEQ ID NO: 2342 - DNA, 225 bp, Unknown
  bacterial strain Ascusb_2301 encodes 16S rRNA
agagtttgatcctggctcaggatgaacgctagcggcaggcttaacacatgcaagtcgaggggcagcggggcccagcaatgggctgccggcgaccggcgcacgggtgcgtaacgcgtatgcaacctgcccgcgacagggggataaccggtggaaacgccgactaataccccgtaatgcactaagtcgcatggcttggtgctgaaagcttcggtggtcgcggatggg

SEQ ID NO: 2343 - DNA, 225 bp, Unknown
  bacterial strain Ascusb_3477 encodes 16S rRNA
agagtttgatcatggctcaggatgaacgctagcggcaggcttaacacatgcaagtcgcggggcagcgcggggtagcaatactctggcggcgaccggcggaagggtgcgtaacgcgtgagcaacttgcccgcatcagggggataagcgttggaaacgacgtctaataccccgtaacaacggtgaccgcatgattaccgtttgaaagctccggcggatgcggatggg

SEQ ID NO: 2344 - DNA, 225 bp, Unknown
  bacterial strain Ascusb_1601 encodes 16S rRNA
agagtttgatcctggctcaggatgaacgctggcggcatgcctaacacatgcaagtcgaacggagctattacggaagcttgcttttgttttagcttagtggcggacgggtgagtaacgcgtgagaaacctgcccttgagtggggaataacaccgagaaatcggtgctaataccgcataatgtcacgggatcgcatgttcttgtgaccaaaggatttattcgcttaa

SEQ ID NO: 2345 - DNA, 225 bp, Unknown
  bacterial strain Ascusb_14943 encodes 16S rRNA
agagtttgatcatggctcaggatgaacgctagctacaggcttaacacatgcaagtcgaggggaaacggcattttagcttgctaagatggacgtcgaccggcgaatgggtgagtaacgcgtatccaaccttccgttaagtagggaatagccttgcgaaagtaagattaatgccctatgtggtgttttgaggacatctgaagatcaccaaaggtttaccgcttaacg

SEQ ID NO: 2346 - DNA, 225 bp, Unknown; identical to SEQ ID NO: 2345
  bacterial strain Ascusb_1125 encodes 16S rRNA

SEQ ID NO: 2347 - DNA, 225 bp, Unknown
  bacterial strain Ascusb_3123 encodes 16S rRNA
agagtttgatcatggctcaggatgaacgctggcggcatgcctaagacatgcaagtcgaacgaggtgtcccattgaagatgaagtgcttgcacagatttggatttggattcacacctagtggcgaacgggtgagtaacacatgggtgacctacctttaagactgggatacctattggaaacgatagttaataccggataacacgtatattcgtttatacgttgaaa

SEQ ID NO: 2348 - DNA, 225 bp, Unknown
  bacterial strain Ascusb_2531 encodes 16S rRNA
agagtttgatcctggctcaggatgaacgctagcggcaggcttaacacatgcaagtcgaggggcagcgcgaggtagcaatactttggcggcgaccggcggaagggtgcgtaacgcgtgagcaacatgcccgtcacagggggataatccatggaaacgtggtctaacaccgcatagattatagaggtgacatcaccattataagaaattcgcaagaaggtgacggat

SEQ ID NO: 2349 - DNA, 225 bp, Unknown
  bacterial strain Ascusb_1147 encodes 16S rRNA
agagtttgatcatggctcaggatgaacgctagcgacaggcctaacacatgcaagtcgaggggcagcgcgggaggagcttgcttttcctggcggcgaccggcgcacgggtgcgtaacaggtgtgcaatctgtcctataccggggcatagcccagcgaaagttgaattaattccccatgtgtcatgaagccgcatgactttatgatgaaacgttagggtatagggtg

SEQ ID NO: 2350 - DNA, 225 bp, Unknown
  bacterial strain Ascusb_1273 encodes 16S rRNA
agagtttgatcatggctcaggatgaacgctagcgacaggcctaacacatgcaagtcgaggggcagcgcggaaatagtttactagttctggcggcgaccggcgcacgggtgcgtaacaggtgtgcaatctgtcctataccggggcatagcccagcgaaagttggattaaatccccatgtgaagtgaagccgcatgactttgctttgaaacgttagggtatagggtg

SEQ ID NO: 2351 - DNA, 225 bp, Unknown
  bacterial strain Ascusb_68 encodes 16S rRNA
agagtttgatcatggctcaggatgaacgctagctacaggcttaacacatgcaagtcgagcggaacttcttcggaagtttagcggcagacgggtgagtaacacgtatccaacctttcccttactcgggtatagcctcgggaaactgagagtaatccccgatgaagtgtacgataagcattttttgcacaccaaagatttatcggtaaggggtggggatgcgttcca

SEQ ID NO: 2352 - DNA, 225 bp, Unknown
  bacterial strain Ascusb_1016 encodes 16S rRNA
agagtttgatcctggctcaggacgaacgctggcggcatgcctaacacatgcaagtcgaacggagttggaaggagcttgctcttttcaacttagtggcggacgggtgagtaacgcgtgagcaacctgcctttcagtggggaataatgttttgaaaagaacactaataccgcataatgtattgaaaccgcatgattttgataccaaaggatttattcgctgagagat

SEQ ID NO: 2353 - DNA, 225 bp, Unknown
  bacterial strain Ascusb_4839 encodes 16S rRNA
agagtttgatcatggctcaggatgaacgctagctacaggcttaacacatgcaagtcgcggggcatcatggtgtgtagcaatacacactgatggcgaccggcggatgggtgagtaacgcgtatccaacctggccctatctcgggcacagcccctcgaaagagggattaattcccgatgttcccacgagttcgcatgttcttgtgggcaaaggcctttgccggatag

SEQ ID NO: 2354 - DNA, 225 bp, Unknown
  bacterial strain Ascusb_1979 encodes 16S rRNA
agagtttgatcatggctcaggacgaacgctggcggcgtgcttaacacatgcaagtcgaacgaagcagcagtgaaggaggcttcggccaatggaactgttgacttagtggcggacgggtgagtaacgcgtgagcaacctgcctttcagagggggataacgtttggaaacgaacgctaataccgcatgaagtatctttgctgcatgacagagataccaaaggagcaa

SEQ ID NO: 2355 - DNA, 225 bp, Unknown
  bacterial strain Ascusb_2685 encodes 16S rRNA
agagtttgatcatggctcaggatgaacgctggcggcgtgcttaacacatgcaagtcgaacggaactggttttgaagatttccttcgggaatgattcgttactagtttagtggcggacgggtgagtaacgcgtgagtaacctgcccttgagagggggataacgttctgaaaagaacgctaataccgcataacattatcgagtcgcatgacttgataatcaaaactc

SEQ ID NO: 2356 - DNA, 225 bp, Unknown
  bacterial strain Ascusb_1448 encodes 16S rRNA
agagtttgatcatggctcaggacgaacgctggcggcgtgcctaacacatgcaagtcgaacgaagcattttcctcggagattcgtcgaagagggacttgacttagtggcggacgggtgagtaatacatgagcaacctgccctgaggagggggacaacagttggaaacgactgctaataccgcatgatgtatccgggaggcatcttctggataccaaagatttatcg

SEQ ID NO: 2357 - DNA, 225 bp, Unknown
  bacterial strain Ascusb_133 encodes 16S rRNA
agagtttgatcatggctcaggacgaacgctggcggcatgcctaacacatgcaagtcgaacggagcttaagaagcttgctttttaagcttagtggcggacgggtgagtaacgcgtgagcaacctgcctttcagtggggaataatactctgaaaagggtactaataccgcataatgtacagagatcgcatggtttatgtaccaaagatttatcgctgagagatgggc

SEQ ID NO: 2358 - DNA, 225 bp, Unknown
  bacterial strain Ascusb_1800 encodes 16S rRNA
agagtttgatcatggctcaggatgaacgctagctacaggcttaacacatgcaagtcgaggggcagcatgaacttagcttgctaagtttgatggcgaccggcgcacgggtgagtaacgcgtatccaacctaccccttagtagggcatagcccgtagaaatgcggattaataccctatgttttccggagacggcatcagaactggaacaaagattgatcgctaaggg

SEQ ID NO: 2359 - DNA, 225 bp, Unknown
  bacterial strain Ascusb_1726 encodes 16S rRNA
agagtttgatcatggctcaggatgaacgctggcggcgtgcctaatacatgcaagtcgaacgagggtgcttgcaccctagtggcgaacgggtgagtaacacgtaggtaacctgccctttagtttgggatacccagaggaaactttggctaataccggatatgaattcgagaggcatctcttgaatttgaaaggagcgtttgctccgctttaggatggacctgcggc

SEQ ID NO: 2360 - DNA, 225 bp, Unknown
  bacterial strain Ascusb_317 encodes 16S rRNA
agagtttgatcatggctcaggatgaacgctggcggcgtgcctaacacatgcaagtcgaacgaagcacattccttcggggatgtgactgagtggcggacgggtgagtaacgcgtgggtaacctgccctgtacagggggacaacagctagaaatggctgctaataccgcataagcgcacgagggggcatcctcttgtgtgaaaaactatcggtggtacaggatgggc

SEQ ID NO: 2361 - DNA, 225 bp, Unknown; identical to SEQ ID NO: 2281
  bacterial strain Ascusb_439 encodes 16S rRNA

SEQ ID NO: 2362 - DNA, 225 bp, Unknown
  bacterial strain Ascusb_985 encodes 16S rRNA
agagtttgatcatggctcaggacgaacgctggcggcgtgcttaacacatgcaagtcgaacgaggttataggagagcttgctcgaatataaccgagtggcggacgggtgagtaacgcgtgagcaacctgtctcacacaggggaataacgcatcgaaagatgtgctaataccgcataggaccacgataggacatcctattgaggtgaaaggagcaatccggtgtgag

SEQ ID NO: 2363 - DNA, 225 bp, Unknown
  bacterial strain Ascusb_2679 encodes 16S rRNA
agagtttgatcatggctcaggatgaacgctagcggcaggcctaacacatgcaagtcgaggggcagcggggtgtagcaatacaccgccggcgaccggcgcacgggtgcgtaacgcgtatgcaacctgcccgcgacagggggataacgctgtgaaagcggcactaataccccgtaacacccggggccgcatggccttgggttgaaaggagagatccggtcgcggatg

SEQ ID NO: 2364 - DNA, 225 bp, Unknown
  bacterial strain Ascusb_6088 encodes 16S rRNA
agagtttgatcatggctcaggatgaacgctagctacaggcttaacacatgcaagtcgcggggcagcgaggggttagcttgctaaccctgtcggcgaccggcgcacgggtgagtaacgcgtatccaaccttccccctagtagggcatagcccggcgaaagtcggattaataccctatgttgtatattgaggacatctgatttataccaaagattgatcgctagggg

SEQ ID NO: 2365 - DNA, 225 bp, Unknown
  bacterial strain Ascusb_245 encodes 16S rRNA
agagtttgatcatggctcagattgaacgctggcggcaggcctaatacatgcaagtcgaacggtaacatggaagtagcaatacttttgatgacgagtggcggacgggtgagtaatgtttgggaatctacctatcagagggggatagcaactggaaacggttgataaaaccgcgtaagctctgaggaggaaagtaatgggatcgcaagaccattagctgatagatga

SEQ ID NO: 2366 - DNA, 225 bp, Unknown
  bacterial strain Ascusb_360 encodes 16S rRNA
agagtttgatcatggctcaggacgaacgctggcggcacgcttaacacatgcaagtcgaacggagttagcccttcgggactaacttagtggcggacgggtgagtaacacgtgagcaacctgccttcgagagtggaataatggccggaaacagccactaataccgcataacacagcgagaccgcatgatcttgctgtcaaagatttatcgctcgaagatgggctcgc

SEQ ID NO: 2367 - DNA, 225 bp, Unknown
  bacterial strain Ascusb_184 encodes 16S rRNA
agagtttgatcatggctcaggatgaacgctggcggcgtgcctaacacatgcaagtcgaacggtgatgatttgaaattttcggatggattttcatcatagtggcggacgggtgagtaacgcgtggataacctgcctcgtactggggaatagcagctggaaacggctggtaataccgcataagcgcacgatgccgcatggcactgtgtgaaaagatttatcggtacg

SEQ ID NO: 2368 - DNA, 225 bp, Unknown
  bacterial strain Ascusb_334 encodes 16S rRNA
agagtttgatcatggctcaggacgaacgctggcggcacgcttaacacatgcaagtcgaacgagcgaaagagtgcttgcactctctagctagtggcggacgggtgagtaacacgtgagcaatctgcctttcggagagggataccatttggaaacgaatgttaatacctcataacataacgaagccgcatgactttgttatcaaacgaatttcgccgaaagatgagc

SEQ ID NO: 2369 - DNA, 225 bp, Unknown
  bacterial strain Ascusb_1745 encodes 16S rRNA
agagtttgatcatggctcaggatgaacgctagcggcaggcctaacacatgcaagtcgaggggcagcggggtgtagcaatacactgccggcgaccggcgcacgggtgcgtaacgcgtatgcaacctgcccgcgacagggggataaccggtggaaacgccgactaataccccgtaacgcactgtctcgcatgggatggtgctgaaagcctccgggtggtcgcggatg

SEQ ID NO: 2370 - DNA, 225 bp, Unknown
  bacterial strain Ascusb_2047 encodes 16S rRNA
agagtttgatcatggctcaggataaacgctggcggcgcacataagacatgcaagtcgaacgaacttaatactttagtttactatagtaagcggttagtggcggactggtgagtaatgcataagcaacctgcctataagagtggaataacagtgagaaatcactgctaataccacataagctgtgagtatggcatcatacaaacagaaaacggagcaatccgctta

SEQ ID NO: 2371 - DNA, 225 bp, Unknown; identical to SEQ ID NO: 2345
  bacterial strain Ascusb_19281 encodes 16S rRNA

SEQ ID NO: 2372 - DNA, 225 bp, Unknown
  bacterial strain Ascusb_1261 encodes 16S rRNA
agagtttgatcatggctcaggatgaacgctggcggcgtgcttaacacatgcaagtcgaacggacttattggaattaatacttcggtaagcgttttaataagttagtggcggacgggtgagtaacgcgtgggtaacctgccttacaccgggggataacagttggaaacgactgctaataccgcataagaccacggtaccgcatggtactggggtaaaagttccggc

SEQ ID NO: 2373 - DNA, 225 bp, Unknown
  bacterial strain Ascusb_21056 encodes 16S rRNA
agagtttgatcatggctcaggataaacgctggcggcgcacataagacatgcaagtcgaacggaagtcgttatattgattttgaagagaacggagaacttgttcaaagggacatgatgaagatttataacaatggctttagtggcggactggtgagtaatacgtaagcaacctgcctattagaggggaacaacagttagaaatgactgctaataccgcatatgcca

SEQ ID NO: 2374 - DNA, 225 bp, Unknown
  bacterial strain Ascusb_2052 encodes 16S rRNA
agagtttgatcatggctcaggatgaacgctggcggcgtgcctaacacatgcaagtcgaacggaactgcatatgaagaattccttcgggaaggactcgcttgtagtttagtggcggacgggtgagtaacgcgtgagtaacctgcccttgagagggggataacgttctgaaaaggacgctaataccgcataacattattgagtcgcatggcttgataatcaaaactc

SEQ ID NO: 2375 - DNA, 225 bp, Unknown
  bacterial strain Ascusb_12390 encodes 16S rRNA
agagtttgatcctggctcaggatgaacgctagctacaggcttaacacatgcaagtcgaggggcagcgaggagttagcttgctaactctgtcggcgaccggcgcacgggtgagtaacgcgtatccaaccttccccttagtagggcatagcccggcgaaagtcggattaataccctatgttgtcgtttgaagacatctgaagacgattaaagattcatcgctaaggg

SEQ ID NO: 2376 - DNA, 225 bp, Unknown
  bacterial strain Ascusb_1155 encodes 16S rRNA
agagtttgatcctggctcaggacgaacgctggcggcgtgcctaacacatgcaagtcgaacggagttgcgtcacgaagttcttcggagcggacgacgcagcttagtggcggacgggtgagtaacgcgtgagcaacctgcctttcagagggggacaacggttggaaacgaccgctaataccgcatgaaatgactggaccgcatgatccggtcatcaaagattttatc

SEQ ID NO: 2377 - DNA, 225 bp, Unknown
  bacterial strain Ascusb_4485 encodes 16S rRNA
agagtttgatcatggctcaggatgaacgctagctacaggcttaacacatgcaagtcgaggggcagcatgaaagtagcttgctacttttgatggcgaccggcgcacgggtgcgtaacacgtatccaatctacccatggctcagggatagcctttcgaaagaaagattaatacctgatggtttcatgagcccgcatggacttatgaataaagatttatcggcgatgg

SEQ ID NO: 2378 - DNA, 225 bp, Unknown
  bacterial strain Ascusb_773 encodes 16S rRNA
agagtttgatcatggctcaggatgaacgctagcgacaggcctaacacatgcaagtcgaggggcagcacttcgggtggcgaccggcgcacgggtgagtaacgcgtatgtaacctgcccttgagtgggggatagcccatcgaaagatggattaataccgcataatgccgcggatgaacatttattagcggccaaagatttattgctcagggatggacatgcgtatga

SEQ ID NO: 2379 - DNA, 225 bp, Unknown
  bacterial strain Ascusb_1956 encodes 16S rRNA
agagtttgatcatggctcaggatgaacgctggcggcgtgcttaacacatgcaagtcgaacggagttatgatgtgagcggaaagaagcttgctttggactaatcttttcataacttagtggcggacgggtgagtaacgcgtgggtaacctgccttatacagggggataacagtcggaaacgactgctaataccgcataagcgcacagtatcgcatgatacagtgtg

SEQ ID NO: 2380 - DNA, 225 bp, Unknown
  bacterial strain Ascusb_3924 encodes 16S rRNA
agagtttgatcctggctcaggatgaacgctagctacaggcttaacacatgcaagtcgaggggcatcatggcgattgcttgcaattgtcgatggcgaccggcgcacgggtgagtaacgcgtatccaaccttccccttagtacgggatagcccggcgaaagtcggattaataccgtatgtattccgaagcaggcatctaatttggaataaagattcatcgctaaggg

SEQ ID NO: 2381 - DNA, 225 bp, Unknown
  bacterial strain Ascusb_2897 encodes 16S rRNA
agagtttgatcatggctcaggatgaacgctagctacaggcttaacacatgcaagtcgaggggcagcattgggatagcttgctattccagatggcgaccggcgcacgggtgagtaacgcgtatccaaccttccccttagtagaggatagcccggcgaaagtcggattaatactctatgttgtgttttgaggacatctgacgaacaccaaaggttcaccgctaaggg

SEQ ID NO: 2382 - DNA, 225 bp, Unknown
  bacterial strain Ascusb_2786 encodes 16S rRNA
agagtttgatcatggctcaggatgaacgctagcgacaggcctaacacatgcaagtcgaggggcagcgcgggagaagcttgcttttcctggcggcgaccggcgcacgggtgcgtaacaggtgtgcaatctgtccatagtcggggaatagcccagcgaaagttggattaaagctccatgtgagtgaacgccgcatgacgatcacttgaaacgtaaggactatgggtg

SEQ ID NO: 2383 - DNA, 225 bp, Unknown
  bacterial strain Ascusb_2500 encodes 16S rRNA
agagtttgatcatggctcaggatgaacgctagcggcaggcttaacacatgcaagtcgaggggtaacgcgaggtagcaatactttggcgacgaccggcgcacgggtgcgtaacgcgtatgcaacctacctgtaacagggggataacggagagaaatttccactaataccccatattgtcattccttcgcatgttgggatgacgaaagcttcggtggttacggatgg

SEQ ID NO: 2384 - DNA, 225 bp, Unknown
  bacterial strain Ascusb_3345 encodes 16S rRNA
agagtttgatcctggctcagaatgaacgttggcggcgtggattaggcatgcaagtcgagcggcaaggtttttattttcggatagggaccctagagcggcggaagggataggacaatatagatacgtgcctcttagctcaggatagcgtctggaaacgggcgataatactgaatgaggtctccggaccaaaggtgagattccgctaggagatcggtctatagccta

SEQ ID NO: 2385 - DNA, 225 bp, Unknown
  bacterial strain Ascusb_4146 encodes 16S rRNA
agagtttgatcatggctcaggatgaacgctggcggcgtgcttaacacatgcaagtcgaacgaagcgtcccgcccgaagaagtggagtgcttgcacaaaacggactcaattgggatgacttagtggcggacgggtgagtaacgcgtgggtaacctgccttacacagggggacaacagttggaaacgactgctaataccgcataacccgctagtaccgcatggtaca

SEQ ID NO: 2386 - DNA, 225 bp, Unknown
  bacterial strain Ascusb_1772 encodes 16S rRNA
agagtttgatcatggctcagaacgaacgctggcggcgcgtcttaagcatgcaagtcgagcgggattatccagcttgctggatatgagagcggcggactggtgagtaacgcgtgggtgacgtgcccttctgcccgggatagccggtagaaataccggataataccggatgagctccgcggcgctggaggccgcggaggaaaggagctattgttccgcggaaggagc

SEQ ID NO: 2387 - DNA, 225 bp, Unknown
  bacterial strain Ascusb_1666 encodes 16S rRNA
agagtttgatcatggctcaggatgaacgctagcgacaggcctaacacatgcaagtcgaggggcagcgcgggagaagcttgcttttcctggcggcgaccggcgcacgggtgcgtaacaggtgtgcaatctgtcctataccggggcatagcccagcgaaagttggattaattctccatgtgaagcgataccgcatgatattgctttgaaacgtaagggtatagggtg

SEQ ID NO: 2388 - DNA, 225 bp, Unknown
  bacterial strain Ascusb_2481 encodes 16S rRNA
agagtttgatcatggctcaggatgaacgctggcggcgtgcttaacacatgcaagtcgaacgaggctgcatggctgaagttttcggatggaagccgtgctgaccgagtggcggacgggtgagtaacgcgtggggaacctgccccattccgggggataccagctggaaacggctgttaataccgcataagcgcacgtgaaggcatcttcgtgtgtgaaaaactgagg

SEQ ID NO: 2389 - DNA, 225 bp, Unknown
  bacterial strain Ascusb_218 encodes 16S rRNA
agagtttgatcatggctcaggatgaacgctggcggcgtgcctaatacatgcaagtcgaacgggtgtagcaatacatcagtggcgaacgggtgagtaacacgttggtgacctgccccaaagatgggaatatcacctggaaacgggtggcaaaaccgaataagcttagctcagtcagagaaggctaagtaaaagcgtaagctactttgggaggggcctgcggcccat

SEQ ID NO: 2390 - DNA, 225 bp, Unknown
  bacterial strain Ascusb_987 encodes 16S rRNA
agagtttgatcatggctcaggatgaacgctagcggcaggcttaacacatgcaagtcgaggggcagcgcggagtagcaatactctggcggcgaccggcggaagggtgcgtaacacgtgagcaacttgcccgtgacagggggataagcgatggaaacgtcgtctaacatcccgtaacacgaggggaggcatctcccttcgttgaaaactccggtggtcacggatggg

SEQ ID NO: 2391 - DNA, 225 bp, Unknown
  bacterial strain Ascusb_4429 encodes 16S rRNA
agagtttgatcctggctcaggatgaacgctggcggcgtgcttaacacatgcaagtcgaacggagtgtagacgctgaagcgatttcggtcaattcttgtttacacttagtggcggacgggtgagtaacgcgtgggtaacctgccgtatgcagggggacaacagttggaaacgactgctaataccgcataagcgcacagataggcatctatcggtgtgaaaagattt

SEQ ID NO: 2392 - DNA, 225 bp, Unknown
  bacterial strain Ascusb_3951 encodes 16S rRNA
agagtttgatcatggctcaggatgaacgctagctacaggcttaacacatgcaagtcgaggggcagcgagaggaaagcttgcttttcttgtcggcgaccggcgcacgggtgagtaacgcgtatccaacctggcccttagtaggggatagcccggcgaaagtcggattaataccctatgttgttcaatgaggacatctgagctgaactaaagatttatcgctaaggg

SEQ ID NO: 2393 - DNA, 225 bp, Unknown
  bacterial strain Ascusb_738 encodes 16S rRNA
agagtttgatcctggctcaggatgaacgctggcggcgtgcttaacacatgcaagtcgaacgaagcgcttttaaatgatctttcgggtgattttaattgtgactgagtggcggacgggtgagtaacgcgtgggtaacctgccttatactgggggatagcagttggaaacgactgataataccgcataagcgcacagttccgcatggaacggtgtgaaaatctccgg

SEQ ID NO: 2394 - DNA, 225 bp, Unknown
  bacterial strain Ascusb_15705 encodes 16S rRNA
agagtttgatcatggctcaggatgaacgctggcggcatgcctaagacatgcaagtcgaacgaagtggcccaatgaagaatgcgagcttgctcaaattcggatttggattcccacttagtggcgcaagggtgagtaacacgtgggtaatctaccttcgagtctggaataacagttagaaatgattgctaatgccggatgatattgagaacgatacttcattcttta

SEQ ID NO: 2395 - DNA, 225 bp, Unknown
  bacterial strain Ascusb_1682 encodes 16S rRNA
agagtttgatcatggctcaggatgaacgctggcggcgtgcctaacacatgcaagtcgaacgaagcatattctgcagagattcgtcgaagcggggtatgacttagtggcggacgggtgagtaatgtatgagcaacctgcctttcagagggggacaacagttggaaacgactgctaataccgcgtaatgtacagaggaggcatcttctttgtaccaaaggagcaatc

SEQ ID NO: 2396 - DNA, 225 bp, Unknown
  bacterial strain Ascusb_2596 encodes 16S rRNA
agagtttgatcatggctcaggatgaacgctagctacaggcttaacacatgcaagtcgaggggcatcggggagttagcttgctaactttgccggcgaccggcgcacgggtgagtaacgcgtatccaaccttccctatagtagaggatagcccggagaaattcggattaatactctatgttcttccatgcggacatctaattggaagcaaaggttcaccgctatagg

SEQ ID NO: 2397 - DNA, 225 bp, Unknown
  bacterial strain Ascusb_4164 encodes 16S rRNA
agagtttgatcctggctcaggatgaacgctagctacaggcttaacacatgcaagtcgaggggcatcgagaaggaagcttgctttctttgtcggcgaccggcgcacgggtgagtaacgcgtatccaaccttccccttagtagggcatagcccggcgaaagtcggattaataccctatgttcttctttgacggcatctgattggaagcaaagatttatcgctaaggg

SEQ ID NO: 2398 - DNA, 225 bp, Unknown
  bacterial strain Ascusb_2361 encodes 16S rRNA
agagtttgatcctggctcagaacgaacgctggcggcgcgtcttaagcatgcaagtcgagcggtaagatggaagcttgcttctatcctagagcggcggactggtgagtaacgcgtgggtgacgtacccttgtgacggggacagctggtagaaatatcagataataccggatacgctgtatgttgtcagaggacatacaggaaaggatcttttgattcgcacaagga

SEQ ID NO: 2399 - DNA, 225 bp, Unknown
  bacterial strain Ascusb_632 encodes 16S rRNA
agagtttgatcatggctcagaacgaacgctggcggcgcgtcttaagcatgcaagtcgaatggcaagatagagcttgctctatcctagaatggcggactggtgagtaacgcgtgggtgacgtaccctttagatggggatagctgatagaaatatcagataataccgaataagctgcatggagttagagttcatgcaggaaaggatcttttgatccgctgaaggagc

SEQ ID NO: 2400 - DNA, 225 bp, Unknown
  bacterial strain Ascusb_8258 encodes 16S rRNA
agagtttgatcatggctcaggatgaacgctagcggcaggcttaacacatgcaagtcgaggggcagcgggtccagcaatggatgccggcgaccggcgcaagggtgcgtaacgcgtgagcgacatgcccgtgaccgggggataaccgatggaaacgtcgcctaaccccccatacgataacatatcgcatggtatgttattgaaaaccgtggtggtcacggattggct

SEQ ID NO: 2401 - DNA, 225 bp, Unknown
  bacterial strain Ascusb_3782 encodes 16S rRNA
agagtttgatcatggctcaggacgaacgctggcggcgtgcctaacacatgcaagtcgaacggagtgcaatttggagattcgtcgaagagctgcacttagtggcggacgggtgagtaatgcgtgagcaacctgcccttcagagggggacaacagttggaaacgactgctaataccgcatgatgtatccgggaggcatcttctggataccaaagattttatcgctga

SEQ ID NO: 2402 - DNA, 225 bp, Unknown
  bacterial strain Ascusb_493 encodes 16S rRNA
agagtttgatcatggctcaggacgaacgctggcggcatgcctaacacatgcaagtcgaacggagcttaaagagcttgctttttaagcttagtggcggacgggtgagtaacgcgtgagtaacctgcctcttagtggggaataataccttgaaaagggtactaataccgcataatgtacagagaccgcatggtcattgtaccaaagatttatcgctgagagatggac

SEQ ID NO: 2403 - DNA, 225 bp, Unknown
  bacterial strain Ascusb_707 encodes 16S rRNA
agagtttgatcatggctcaggacgaacgctggcggcgtgcctaacacatgcaagtcgaacggagatactcctaattgagatttcggttgagagagggaatatcttagtggcggacgggtgagtaacgcgtgagtaacctgcctataagagggggataacgttctgaaaaggacgctaataccgcataacatatatttttcgcatgaaaggtatatcaaaggagga

SEQ ID NO: 2404 - DNA, 225 bp, Unknown
  bacterial strain Ascusb_10267 encodes 16S rRNA
agagtttgatcctggctcaggatgaacgctagcgacaggcctaacacatgcaagtcgaggggcagcgcgggagaagcttgcttttcctggcggcgaccggcgcacgggtgcgtaacaggtgtgcaatctgtccatagtcgggggatagcccagcgaaagctgaattaatactccatgtgaatcgaagccgcatgactttgatttgaaacgcgaggactatgggtg

SEQ ID NO: 2405 - DNA, 225 bp, Unknown
  bacterial strain Ascusb_6422 encodes 16S rRNA
agagtttgatcatggctcaggatgaacgctagctacaggcttaacacatgcaagtcgcggggcagcatgaagtttgcttgcaaactttgatggcgaccggcgcacgggtgagtaacgcgtatccaacctgcccttcagtagggaatagcccggcgaaagtcggattaatgccctatgttcttcgttgatgacatctgatatgaagcaaaggcttgccgctgaggg

SEQ ID NO: 2406 - DNA, 225 bp, Unknown
  bacterial strain Ascusb_1967 encodes 16S rRNA
agagtttgatcatggctcaggacgaacgctggcggcgtgcctaacacatgcaagtcgaacggacgagaggagcttgctcctcgagttagtggcgaacgggtgagtaacgcgtgagcaacctgcctttcagagggggacaacggttggaaacgaccgctaataccgcatgatgcattctgaccgcatgatcgggatgccaaagatttatcgctgaaagatgggctc

SEQ ID NO: 2407 - DNA, 225 bp, Unknown
  bacterial strain Ascusb_761 encodes 16S rRNA
agagtttgatcatggctcaggataaacgctggcggcgcacataagacatgcaagtcgaacgaacttaatactttagtttactatagtaagcggttagtggcggactggtgagtaatgcataagcaacctgcctataagaagggaataacagtgagaaatcactgctaataccgtataagctgtgagtatggcatcatacaaacagaaaaaggagcaatccgctta

SEQ ID NO: 2408 - DNA, 225 bp, Unknown
  bacterial strain Ascusb_8881 encodes 16S rRNA
agagtttgatcatggctcaggatgaacgctggcggcatgcctaagacatgcaagtcgaacgaagtggcccaatgaagagtgcgagcttgctcaaactcggatttggattaccacttagtggcgcaagggtgagtaacacgtgggtaatctaccttcgagtctggaataacagttagaaatgattgctaatgccggatgatatggggaacgacattcattctttat

SEQ ID NO: 2409 - DNA, 225 bp, Unknown
  bacterial strain Ascusb_13304 encodes 16S rRNA
agagtttgatcatggctcaggatgaacgctggcggcatgcctaagacatgcaagtcgaacgaggtggcccattgaaggatgcgtgcttgcacaaatctggatttggattaccacctagtggcagacgggtgagtaacacgtgggtgacctacctttaagctggggataacagttggaaacgattgctaataccgaataatgtataactgtcaaggttatactgaa

SEQ ID NO: 2410 - DNA, 225 bp, Unknown
  bacterial strain Ascusb_6655 encodes 16S rRNA
agagtttgatcctggctcaggataaacgctggcggcgcacataagacatgcaagtcgaacggaagtcgttatatttgattctgaatgaaagatttatccggaatgatgatgattttataacaatggctttagtggcggactggtgagtaacgcgtaagcaatctgcctattagaggggaataacagtgagaaatcattgctaataccgcatatgccatgagtatc

SEQ ID NO: 2411 - DNA, 225 bp, Unknown
  bacterial strain Ascusb_10412 encodes 16S rRNA
agagtttgatcctggctcaggatgaacgctggcggcgtgcctaacacatgcaagtcgaacgaagcatatctgacggagattcgtcgaagccgggtatgacttagtggcggacgggtgagtaatgtatgagcaacctgcctttcagagggggacaacagttggaaacgactgctaataccgcataatgtatttgagtggcatcactcggataccaaaggagcaatc

SEQ ID NO: 2412 - DNA, 225 bp, Unknown
  bacterial strain Ascusb_2258 encodes 16S rRNA
agagtttgatcatggctcaggatgaacgctagcgtaacgcttaacacatgcaagtcgaacgaattctgcgttgtagcaatacatagtagaattagtggcaaacgagcgagtaacacgtacttaacttgcccttaagatgagtataactatagagatatagctaatcctcaatatgctcacgatggtgaaattccgatgtgaggaaagatttatcgcttaaggaga

SEQ ID NO: 2413 - DNA, 225 bp, Unknown
  bacterial strain Ascusb_10132 encodes 16S rRNA
agagtttgatcatggctcaggatgaacgctggcggcgtgcctaacacatgcaagtcgaacgaagcatacggaccggagattcgtcaaaggaccgtatgacttagtggcggacgggtgagtaatgtatgagcaacctgcctttcagagggggacaacagttggaaacgactgctaataccgcgtaacgtatcgagggggcatcctcatgataccaaaggagcaatc

SEQ ID NO: 2414 - DNA, 225 bp, Unknown
  bacterial strain Ascusb_10378 encodes 16S rRNA
agagtttgatcatggctcaggataaacgctggcggcgcacataagacatgcaagtcgaacggaagtcgttatactgattttgataagaacggagaacttgttcaaagggacttgatgaagatttataacaatggctttagtggcggactggtgagtaatacgtaagcaacctgcctattagaggggaacaacagttagaaatgactgctaataccgcatatgcca

SEQ ID NO: 2415 - DNA, 225 bp, Unknown
  bacterial strain Ascusb_788 encodes 16S rRNA
agagtttgatcatggctcaggatgaacgctggcggcgtgcttaacacatgcaagtcgaacgaagctctccgaattgagatttcggtcaagacgaggagatgacttagtggcggacgggtgagtaacgcgtgggtaacctgccgtatgcagggggacaacagttggaaacgactgctaataccgcataagcgcacggttctgcatggaacagtgtgaaaagattta

SEQ ID NO: 2416 - DNA, 225 bp, Unknown
  bacterial strain Ascusb_536 encodes 16S rRNA
agagtttgatcatggctcaggatgaacgctggcggcgtgcttaacacatgcaagtcgaacggagtgtaaacgctgaagcgatttcggtcaattcttgtttatacttagtggcggacgggtgagtaacgcgtgggtaacctgccgtatgcagggggacaacagttggaaacgactgctaataccgcataagcgcacagtaccgcatggtacagtgtgaaaagatct

SEQ ID NO: 2417 - DNA, 225 bp, Unknown
  bacterial strain Ascusb_2715 encodes 16S rRNA
agagtttgatcatggctcaggatgaacgctggcggcgtgcttaacacatgcaagtcgaacgaggtataccgtatgaagttttcggacagaatgtggtataccgagtggcggacgggtgagtaacgcgtgggtaacctgccccatacagggggacaacagatggaaacgtctgctaataccgcataagcgcacggtatggcatcatacagtgtgaaaagttccggc

SEQ ID NO: 2418 - DNA, 225 bp, Unknown
  bacterial strain Ascusb_1407 encodes 16S rRNA
agagtttgatcatggctcaggacgaacgctggcggcgtgcctaacacatgcaagtcgaacgaagcacttccgatttgagattcgtcaagaattggatttgacttagtggcggacgggtgagtaatgcgtgagcaacctgcccttgagtgggggacaacagttggaaacgactgctaataccgcataacgtatccgggaggcatcttctggataccaaagatttat

SEQ ID NO: 2419 - DNA, 225 bp, Unknown
  bacterial strain Ascusb_6841 encodes 16S rRNA
agagtttgatcctggctcaggatgaacgctggcggcgtgcttaacacatgcaagtcgaacggaactgcttttgaagatttccttcgggaatgaatcagttgtagtttagtggcggacgggtgagtaacgcgtgagtaacctgcccttgagagggggataacgttctgaaaaggacgctaataccgcataacattatcgagtcgcatggcttgataatcaaaactc

SEQ ID NO: 2420 - DNA, 225 bp, Unknown
  bacterial strain Ascusb_988 encodes 16S rRNA
agagtttgatcatggctcaggatgaacgctggcggcgtgcttaacacatgcaagtcgaacgaagccaaaaggaagcttgctttctttgaagcttagtggcggacgggtgagtaacgcgtgaggaacctgcccttcagtggggaataacagccggaaacgactgctaataccgcataacgtcggagtgccgcatgacacaccgaccaaaggatttattcgctgaag

SEQ ID NO: 2421 - DNA, 225 bp, Unknown
  bacterial strain Ascusb_904 encodes 16S rRNA
agagtttgatcatggctcaggacgaacgctggcggcgtgcctaacacatgcaagtcgaacggacgaggggagcttgctccccaagttagtggcggacgggtgagtaacacgtgagcaacctgcccttcggagggggacaacagcgggaaactgctgctaataccgcataacgtattctggaggcatctccgggataccaaagattttatcgccgaaggatgggct

SEQ ID NO: 2422 - DNA, 225 bp, Unknown
  bacterial strain Ascusb_2245 encodes 16S rRNA
agagtttgatcatggctcaggacgaacgctggcggcgtgcttaacacatgcaagtcgaacgaggttattggagagcttgctcgaagataaccgagtggcggacgggtgagtaacgcgtgagcaacctgtctcacacaggggaataacgcatcgaaagatgtgctaataccgcgtaggaccacggcgtcgcatggcgctgaggtgaaaggagaaatccggtgtgag

SEQ ID NO: 2423 - DNA, 225 bp, Unknown
  bacterial strain Ascusb_3078 encodes 16S rRNA
agagtttgatcatggctcaggacgaacgctggcggcgcgcctaacacatgcaagtcgaacggagcttggagagcttgcttttcaagcttagtggcggacgggtgagtaacacgtgagcaacctgcctttcagagggggacaacagttggaaacgactgctaataccgcataacatcatcggatggcatcatttgatgatcaaagatttatcgctgaaagatgggc

SEQ ID NO: 2424 - DNA, 225 bp, Unknown
  bacterial strain Ascusb_1040 encodes 16S rRNA
agagtttgatcatggctcaggatgaacgctggcggcgtgcctaatacatgcaagtcgaacgagcgagatccagcttgctggatttagcgagtggcgaacgggtgagtaatacgtaagcaacctgcctacacggactgggataacacctggaaacgggcgctaataccggataggtaatgagaaggcatcttcttattattaaaggtttgaaacacaagtagatgg

SEQ ID NO: 2425 - DNA, 225 bp, Unknown
  bacterial strain Ascusb_4177 encodes 16S rRNA
agagtttgatcatggctcaggatgaatgctggcggcgtgcctaatacatgcaagtcgaacggtaacagggtctcactgttctcttgacgctcttggcctattggtaagagttatagattcgagggaactgtgagattgctgacgagtggcggacggctgagtaacgcgtgggaacataccctaaactgagggataactagtcgaaagattagctaataccgcata

SEQ ID NO: 2426 - DNA, 225 bp, Unknown
  bacterial strain Ascusb_4947 encodes 16S rRNA
agagtttgatcctggctcaggataaacgctggcggcgcacataagacatgcaagtcgaacggaagtcgttatattgattttgaagagaacggagaacttgttcaaagggacatgatgaagatttataacaatggctttagtggcggactggtgagtaatacgtaagcaacctgcctattagaggggaacaacagttagaaatgactgctaataccgcatatgcca

SEQ ID NO: 2427 - DNA, 225 bp, Unknown
  bacterial strain Ascusb_8556 encodes 16S rRNA
agagtttgatcctggctcaggatgaacgctggcggcatgcctaagacatgcaagtcgtacgagaaggcccactgaaattaatcgaagttggagtgcttgcacaaagatggactttggtggatgtggattctccttcgagtggcaaacgggtgagtaacacgtgggttacctacctctaagacggggataccaattggaaacgattgttaataccggatgtgttct

SEQ ID NO: 2428 - DNA, 225 bp, Unknown
  bacterial strain Ascusb_1345 encodes 16S rRNA
agagtttgatcatggctcagaacgaacgctggcggcgcgtcttaagcatgcaagtcgagcggtaagttatagcttgctataacctagagcggcggactggtgagtaacgcgtgggtgacgtacctttgtgacggggacagctcctagaaataggagataataccggatacgctgcatgttgtcagaggacatgcaggaaaggatcttttgattcgcacagagagc

SEQ ID NO: 2429 - DNA, 225 bp, Unknown
  bacterial strain Ascusb_2446 encodes 16S rRNA
agagtttgatcatggctcaggatgaacgctagctacaggcttaacacatgcaagtcgaggggtaacaggaggaaagcttgcttttcttgctgacgaccggcgcacgggtgagtaacgcgtatccaaccttccccttagtagaggatagcccggcgaaagtcggattaatactctatgttcttcctggatggcatctgatgggaagcaaaggttcaccgctaaggg

SEQ ID NO: 2430 - DNA, 225 bp, Unknown
  bacterial strain Ascusb_1592 encodes 16S rRNA
agagtttgatcatggctcaggacgaacgctggcggcgtgcctaacacatgcaagtcgagcggagacatattgcaaagaggaagttttcggatggaatcagagggatatgttttagcggcggacgggtgagtaacgcgtgagcaacctgtcccttacagagggataacacagcgaaagttgtactaataccgcataagaccacggaccggcatcggtttgaggtca

SEQ ID NO: 2431 - DNA, 225 bp, Unknown
  bacterial strain Ascusb_1752 encodes 16S rRNA
agagtttgatcatggctcaggatgaacgctagctacaggcttaacacatgcaagtcgaggggcagcataacgaaagcttgcttttgttgatggcgaccggcgcacgggtgagtaacgcgtatccaaccttccccttagtagggcatagcccggcgaaagtcggattaataccctatgttcttcgtcgaggacatctgaaatggagcaaaggtttaccgctaaggg

SEQ ID NO: 2432 - DNA, 225 bp, Unknown
  bacterial strain Ascusb_454 encodes 16S rRNA
agagtttgatcatggctcaggacgaacgctggcggcatgcctaacacatgcaagtcgaacgaagcttgagagcttgcttttaagcttagtggcggacgggtgagtaacgcgtgagcaacctgcctttcagtggggaataatactttgaaaagagtactaataccgcataacgtataatggtcgcatgactgatataccaaagatttatcgctgagagatgggctc

SEQ ID NO: 2433 - DNA, 225 bp, Unknown
  bacterial strain Ascusb_1224 encodes 16S rRNA
agagtttgatcctggctcaggatgaacgctggcggcgtgcttaacacatgcaagtcgaacggagattactttttagcttgctaagttgtaatcttagtggcggacgggtgagtaacgcgtgggtaacctgccttatccagggggataacagtgagaaattactgctaataccgcataagcgcacagtttcgcatgaaacagtgtgaaaagatttatcgggataag

SEQ ID NO: 2434 - DNA, 225 bp, Unknown
  bacterial strain Ascusb_3957 encodes 16S rRNA
agagtttgatcatggctcaggacaaacgctggcggcgtgcctaacacatgcaagtcgaacgaagcactgtggaaagagacttcggtcaattgaaactttgacttagtggcggacgggtgagtaatgcatgagcaacctgccctggagagggggacaacagctggaaacggctgctaataccgcatgatgtcactgggaggcatctcctggtgaccaaagatttat

SEQ ID NO: 2435 - DNA, 225 bp, Unknown
  bacterial strain Ascusb_9106 encodes 16S rRNA
agagtttgatcctggctcaggacgaacgctggcggcgtgcttaacacatgcaagtcgaacgaggttatgtgaaggaagtcttcggatggaatttgtataaccgagtggcggacgggtgagtaacgcgtgaggaacctgtcttctacagggggataacggtccgaaaggattgctaataccgcataagaccacgaggccgcatggtcatgaggtcaaaggagaaat

SEQ ID NO: 2436 - DNA, 225 bp, Unknown
  bacterial strain Ascusb_2036 encodes 16S rRNA
agagtttgatcctggctcaggatgaacgctggcggcacgcttaacacatgcaagtcgagcggaggcggagacttcggtttccaactcagcggcggacgggtgaggaacgcgtgggtaatctgccccataccgggggataactcagagaaatctgagctaaaaccgcataagcctacggagtcgcatggctctggaggaaaaactccggtggtatgggatgagccc

SEQ ID NO: 2437 - DNA, 225 bp, Unknown
  bacterial strain Ascusb_294 encodes 16S rRNA
agagtttgatcatggctcaggatgaacgctggcggcgtgcctaatacatgcaagtcgaacgggtgcagcaatgtaccagtggcgaacgggtgagtaacacgttggtgacctgccccaaagatgggaatatcacctggaaacgggtggcaaaaccgaataagcttaccccttttagaaaagggtaagtaaaagcgaaagctactttgggaggggcctgcggcccat

SEQ ID NO: 2438 - DNA, 225 bp, Unknown
  bacterial strain Ascusb_3017 encodes 16S rRNA
agagtttgatcatggctcaggacgaacgctggcggcgtgcctaacacatgcaagtcgaacggaagtaagcgctgatgaagcttcggcagattcttgtttactttagtggcggacgggcgagtaacgcgtgagcaacctgcccttcagagggggacaacagttggaaacgactgctaataccgcataacgtatcgggatggcatcatcctgataccaaaggagcaa

SEQ ID NO: 2439 - DNA, 225 bp, Unknown
  bacterial strain Ascusb_225 encodes 16S rRNA
agagtttgatcatggctcaggatgaacgctggcggcgtgcttaatacatgcaagtcgaacgaagttttctcgccgaagcttgcttcattgagaaaacttagtggcggacgggtgagtaacgcgtgggtaacctgccttacacagggggataacagttagaaatgactgctaataccgcataagcgcacgaaatcgcatgattatgtgtgaaaagatttatcggtg

SEQ ID NO: 2440 - DNA, 225 bp, Unknown
  bacterial strain Ascusb_4891 encodes 16S rRNA
agagtttgatcatggctcaggatgaacgctggcggcgtgcctaacacatgcaagtcgaacgaagcacttctaatcggagatttgtcaaagattgggattgacttagtggcggacgggtgagtaatgcgtgagcaacctgcctttcagagggggacaacagttggaaacgactgctaataccgcataacataaccggggggcatcccctggttatcaaaggagcaa

SEQ ID NO: 2441 - DNA, 225 bp, Unknown
  bacterial strain Ascusb_4668 encodes 16S rRNA
agagtttgatcctggctcaggatgaacgctggcggcatgcctaagacatgcaagtcgaacgaagtggcccaatgaagagagcgagcttgctcaatctcagatttggattcccacttagtggcgcaagggtgagtaacacgtgggtaatctgccttcgagtctggaataacagttagaaatgattgctaatgccggataatatggagaacgatacgtcattcttta

SEQ ID NO: 2442 - DNA, 225 bp, Unknown
  bacterial strain Ascusb_965 encodes 16S rRNA
agagtttgatcctggctcaggatgaacgctggcggcgtgcttaacacatgcaagtcgaacgaagcgctttatttgatttcttcggaatgaagattttgcgactgagtggcggacgggtgagtaacgcgtgggtaacctgccttgtacagggggataacagttggaaacgactgctaataccgcataagcgcacaggaccgcatggtctggtgtgaaaaactccgg

SEQ ID NO: 2443 - DNA, 225 bp, Unknown
  bacterial strain Ascusb_1480 encodes 16S rRNA
agagtttgatcatggctcaggacgaacgctggcggcgcgcctaacacatgcaagtcgaacggagcttggagagcttgcttttcaagcttagtggcggacgggtgagtaacacgtgagcaacctgcctttcagagggggacaacagttggaaacgactgctaataccgcataacatcgtgagatggcatcattttacgatcaaagatttatcgctgaaagatgggc

SEQ ID NO: 2444 - DNA, 225 bp, Unknown
  bacterial strain Ascusb_1742 encodes 16S rRNA
agagtttgatcatggctcaggataaacgctggcggcgtgcctaatacatgcaagtcgatcgctggagttctagcttgctagagcgaaggagaggcgaacgggtgagtaatacataagcaacctgcccacgaagactgggataattcctggaaacggggactaataccggataggcagcttgatcgcatgatcgagctgttaaagattcaaagcactggtggatgg

SEQ ID NO: 2445 - DNA, 225 bp, Unknown
  bacterial strain Ascusb_219 encodes 16S rRNA
agagtttgatcatggctcaggatgaacgctggcggcgtgcataacacattcaagtcgaacggtgaagtcccttcggggacggatcagtggcggacgggtgagtaacgcgtgagcaacctgccgtatagtgggggataacacagggaaacttgtgctaataccgcatgacacataggaaccgcatgattccgatgtcaaagatttattgctgtacgatgggctcgc

SEQ ID NO: 2446 - DNA, 225 bp, Unknown
  bacterial strain Ascusb_4249 encodes 16S rRNA
agagtttgatcggccacactgggactgatacacggcccagactcctacgggagacagcagttaggaatattcgtcaatgggggaaaccctgaacgagcaatgccgcgtgaacgatgacggtcctctggattgtaaagttctgttgtttggaaataatgatagctttaggaaatgattgctatttgaaggtaccattcaagaaagctccggctaactacgtgccag

SEQ ID NO: 2447 - DNA, 225 bp, Unknown
  bacterial strain Ascusb_7742 encodes 16S rRNA
agagtttgatcatggctcaggatgaacgctggcggcatgcctaagacatgcaagtcgaacgaagtggcccaatgaagaatgcgagcttgctcaaatttagatttggatctccacttagtggcgcaagggtgagtaacacgtggataatctacctttgagtctggaataacaattagaaatgattgctaatgccggattatatatataatgttacgacataatata

SEQ ID NO: 2448 - DNA, 225 bp, Unknown
  bacterial strain Ascusb_5251 encodes 16S rRNA
agagtttgatcctggctcaggatgaacgctggcggcacgcttaacacatgcaagtcgaacgaagatttaagagcttgcttttaaatcttagtggcggacgggtgcgtaacgcgtgggtaacctacccttgacagggggataacgtatagaaatgtacgctaataccgcataagcccacggagtcgcatggctctgagggaaaagctgagacggtcaaggatgggc

SEQ ID NO: 2449 - DNA, 225 bp, Unknown
  bacterial strain Ascusb_2106 encodes 16S rRNA
agagtttgatcctggctcaggatgaacgctggcggcgtgcttaacacatgcaagtcgaacgaagctctgcgaactgagatttcggtcaaggtgaggagatgacttagtggcggacgggtgagtaacgcgtgggtaacctgccgtatgcagggggacaacagttggaaacgactgctaataccgcataagcgcacggttctgcatggaacagtgtgaaaagattta

SEQ ID NO: 2450 - DNA, 225 bp, Unknown
  bacterial strain Ascusb_758 encodes 16S rRNA
agagtttgatcatggctcaggatgaacgctggcggcgtgcttaacacatgcaagtcgaacgaagctcccagatctgatgattcgtctgaagtgaagggaagacttagtggcggacgggtgagtaacgcgtgggtaacctgccgtatacagggggataacagttagaaatgactgctaataccgcataagcgcacagtaaggcatcttacagtgtgaaaaactccg

SEQ ID NO: 2451 - DNA, 225 bp, Unknown
  bacterial strain Ascusb_2304 encodes 16S rRNA
agagtttgatcatggctcaggacgaacgctggcggcgtgcctaacacatgcaagtcgaacggacgaggggagcttgctccccgagttagtggcggacgggtgagtaacgcgtgagcaacctgcctttcagtgggggacaacggttggaaacgaccgctaataccgcataacacagcggaggggcatccctctggtgtcaaagatttattgctgaaagatgggctc

SEQ ID NO: 2452 - DNA, 225 bp, Unknown
  bacterial strain Ascusb_567 encodes 16S rRNA
agagtttgatcatggctcaggatgaacgctagcggcaggcttaacacatgcaagtcgaggggtaacgcggtgtagcaatacactggcgacgaccggcgcacgggtgcgtaacgcgtatgcaacctacctgtaacaggggcataacggagggaaacttccactaattccccatattgttgtgataccgcatgatattgcaacgaaagcttcggtggttacggatgg

SEQ ID NO: 2453 - DNA, 225 bp, Unknown
  bacterial strain Ascusb_963 encodes 16S rRNA
agagtttgatcatggctcaggatgaacgctggcggcgtgcttaacacatgcaagttgggcggtttctttcgaatgagacttcggtggattttggaagagatagcagcggacgggtgagtaaagcacaaggacgtgccctgaggcgggggacaactacgggaaaccgtagctaataccccgtaagccgagaggtgaaagcagcaatgcgccgaaggagcgacttgt

SEQ ID NO: 2454 - DNA, 225 bp, Unknown
  bacterial strain Ascusb_4244 encodes 16S rRNA
agagtttgatcatggctcagaacgaacgctggcggcgcgtcttaagcatgcaagtcggacggcaagattagagcttgctctgatcctagagtggcggactggtgagtaacgcgtgggtgacgtacccttttgacggggatagcttttagaaataagagataataccggataagctctgcattgttagagggtgcagaggaaaggttctttagaaccgcgaaagga

SEQ ID NO: 2455 - DNA, 225 bp, Unknown
  bacterial strain Ascusb_2539 encodes 16S rRNA
agagtttgatcctggctcagaacgaacgctggcggcgcgtcttaagcatgcaagtcgagcggtaagttatagcttgctataacctagagcggcggactggtgagtaacgcgtgggtgacgtacctttgtgacggggacagctggtagaaatatcagataataccggatacgctgcatgttgtcagaggacatgcaggaaaggttcttttgaaccgcacagagagc

SEQ ID NO: 2456 - DNA, 225 bp, Unknown
  bacterial strain Ascusb_2123 encodes 16S rRNA
agagtttgatcctggctcaggatgaacgctagctacaggcttaacacatgcaagtcgaggggcatcacgtgaggcagcaatgcatctgggtggcgaccggcgaatgggtgagtaacgagtatccaacctggcccatactcgggcacagccccgcgaaagcgggattaatgcccgatgcggcgtatctcccgcatgggaattacgtcaaaggtataaactggtatg

SEQ ID NO: 2457 - DNA, 225 bp, Unknown
  bacterial strain Ascusb_75 encodes 16S rRNA
agagtttgatcatggctcaggacgaacgctggcggcgtgcctaacacatgcaagtcgaacggaactgcttcgaaggatttcttcggaatgacattgattcagtttagtggcggacgggtgagtaacgcgtgagtaacctgccttcaagagggggataacattctgaaaagaatgctaataccgcatgacatatgattgtcgcatggcagacatatcaaagattta

SEQ ID NO: 2458 - DNA, 225 bp, Unknown
  bacterial strain Ascusb_3175 encodes 16S rRNA
agagtttgatcctggctcaggatgaacgctagctacaggcttaacacatgcaagtcgaggggcagcatagggtttgcttgcaaactctgatggcgaccggcgcacgggtgagtaacgcgtatccaacctgcccatggctagggaatagcccgttgaaaagcggattaatgccctatggcgtcctttgaaggcatctaacgaggactaaaggtttaccggccatgg

SEQ ID NO: 2459 - DNA, 225 bp, Unknown
  bacterial strain Ascusb_2389 encodes 16S rRNA
agagtttgatcatggctcaggatgaacgctggcggcgtgcctaacacatgcaagtcgaacggaactggttttgaagattctcttcggagatgattcgttactagtttagtggcggacgggtgagtaacgcgtgagtaacctgcccttgagagggggataacgttctgaaaaggacgctaataccgcataatactattgaaccgcatgatttaatagtcaaaactc

SEQ ID NO: 2460 - DNA, 225 bp, Unknown
  bacterial strain Ascusb_2710 encodes 16S rRNA
agagtttgatcatggctcaggatgaacgctagcgacaggcctaacacatgcaagtcgaggggcagcgcggggaaagcttgcttttcctggcggcgaccggcgcacgggtgagtaacgcgtatgcaacctgccagcaagcgcgggatagccttccgaaagggagattaacaccgcatgaggccgcggatgggcatccatctgcggtgaaatgagaagcttgctgat

SEQ ID NO: 2461 - DNA, 225 bp, Unknown
  bacterial strain Ascusb_2633 encodes 16S rRNA
agagtttgatcctggctcaggatgaacgctagctacaggcttaacacatgcaagtcgaggggcagcatgaagtttgcttgcaaactttgatggcgaccggcgcacgggtgagtaacgcgtatccaaccttccccttactagggaatagcccggcgaaagtcggattaatgccctatgttctcctttgcgggcatctaacgaggagcaaagattcatcggtaaggg

SEQ ID NO: 2462 - DNA, 225 bp, Unknown
  bacterial strain Ascusb_229 encodes 16S rRNA
agagtttgatcatggctcaggacgaacgctggcggcgtgcctaacacatgcaagtcgaacggagtgaaagtagcttgctactggaacttagtggcggacgggtgagtaacacgtgagtaacctgcctttcagaggggaataatgtctggaaacggacactaataccgcataacatattttgatcgcatgatcgggatatcaaaggagcaatccgctgaaagatgg

SEQ ID NO: 2463 - DNA, 225 bp, Unknown
  bacterial strain Ascusb_2219 encodes 16S rRNA
agagtttgatcatggctcaggacgaacgctggcggcgtgcctaacacatgcaagtcgaacgaagcactcggagcttgctttgagtgacttagtggcggacgggtgagtaatgcgtgagcaacctgccctgaagagggggacaacagttggaaacgactgctaataccgcatgatgtattctgggggcatccccgggataccaaagatttatcgcttcaggatggg

SEQ ID NO: 2464 - DNA, 225 bp, Unknown
  bacterial strain Ascusb_5606 encodes 16S rRNA
agagtttgatcatggctcaggatgaacgctggcggcacgcttaacacatgcaagtcgaacgaagcttacggaagggagttttcggacaaacggaagtaagacttagtggcggacgggtgcgtaacgcgtgggtaacctaccctggactgggggataacgtatagaaatgtacgctaataccgcataagctcacgggaccgcatggttctgtgggaaaagccgaga

SEQ ID NO: 2465 - DNA, 225 bp, Unknown
  bacterial strain Ascusb_14227 encodes 16S rRNA
aggtttgatcatggctcaggatgaacgctagctacaggcttaacacatgcaagtcgaggggaaacggcattttagcttgctaagatggacgtcgaccggcgaatgggtgagtaacgcgtatccaaccttccgttaagtagggaatagccttgcgaaagtaagattaatgccctatgtggtgttttgaggacatctgaagatcaccaaaggtttaccgcttaacga

SEQ ID NO: 2466 - DNA, 225 bp, Unknown
  bacterial strain Ascusb_2205 encodes 16S rRNA
agagtttgatcatggctcaggatgaacgctagctacaggcttaacacatgcaagtcgaggggcagcatggagtcagcttgctgactttgatggcgaccggcgcacgggtgcgtaacacgtatccaatctacccatggctcagggatagcctttcgaaagaaagattaatacctgatggtctcaagttaagacatcttttcttgagtaaagatttatcggcgatgg

SEQ ID NO: 2467 - DNA, 225 bp, Unknown
  bacterial strain Ascusb_6203 encodes 16S rRNA
agagtttgatcctggctcaggatgaacgctggcggcatgcctaagacatgcaagtcgaacgaagtggcccaatgaagaatgcgagcttgctcaagtttggatttggattcccacttagtggcgcaagggtgagtaacacgtaggtaatctaccttcgagtctggaataacagttagaaatgattgctaatgccggatgatatggggaacgataattcattcatta

SEQ ID NO: 2468 - DNA, 225 bp, Unknown
  bacterial strain Ascusb_9859 encodes 16S rRNA
agagtttgatcatggctcaggatgaacgctggcggcatgcctaagacatgcaagtcgaacgaagtggcccaatgaagaatgcgagcttgctcaaatttggatttggattcccacttagtggcgcaagggtgagtaacacgtgggtaatctaccttcgagtctggaataacagttagaaatgattgctaatgccggataatatggggaacgatatttcattcttta

SEQ ID NO: 2469 - DNA, 225 bp, Unknown
  bacterial strain Ascusb_1641 encodes 16S rRNA
agagtttgatcatggctcaggatgaacgctggcggcgtgcctaatacatgcaagtcgaacggagatgccgaatcagaagccttcgggcggacgaattggtaatcttagtggcggacgggtgagtaacacgtgagcaacctgcctttcagagggggacaacgactggaaacggtcgctaataccgcataacataccgagacggcatcgtcatggtatcaaaggagc

SEQ ID NO: 2470 - DNA, 225 bp, Unknown
  bacterial strain Ascusb_1731 encodes 16S rRNA
agagtttgatcctggctcagaacgaacgctggcggcgcgtcttaagcatgcaagtcgaacgggatcatccagcttgctggatgtgagagtggcggactggtgagtaacacgtgggtgacgtacccttgagacggggatagccggtagaaataccgggtaataccggatgtgaagtgtggtcttggaagccatactggaaaggagcttttgctccgctcgaggaac

SEQ ID NO: 2471 - DNA, 225 bp, Unknown
  bacterial strain Ascusb_3389 encodes 16S rRNA
agagtttgatcatggctcaggataaacgctggcggcgtgcataacacattcaagtcgaacgaagctccggaacttgcttgcaagggaaggaagacttagtggcggacgggtgagtaacgcgtgagcaacctgcctcggggtgcgggataacgtttggaaacgaacgctaataccgcatgacgcacggagatcgcatggtcactgtgccaaagatttattgccctg

SEQ ID NO: 2472 - DNA, 225 bp, Unknown
  bacterial strain Ascusb_2030 encodes 16S rRNA
agagtttgatcatggctcaggacgaacgctggcggcgtgcctaacacatgcaagtcgaacggagctgttacggaagttcttcggagcggaagtttcagcttagtggcggacgggtgagtaacgcgtgagcaacctgcctttcagagggggacaacggttggaaacgaccgctaataccgcatgaagcattttgaccgcatgatcgagatgccaaagattttatcg

SEQ ID NO: 2473 - DNA, 225 bp, Unknown
  bacterial strain Ascusb_6801 encodes 16S rRNA
agagtttgatcctggctcaggacgaacgctggcggcgtgcctaacacatgcaagtcgaacggacgaggggagcttgctccccaagttagtggcggacgggtgagtaacacgtgagcaacctgcccttcggagggggacaacagcgggaaactgctgctaataccgcataatgtattctggaggcatctccgggataccaaagattttatcgccgaaggatgggct

SEQ ID NO: 2474 - DNA, 225 bp, Unknown
  bacterial strain Ascusb_1953 encodes 16S rRNA
agagtttgatcctggctcagaacgaacgctggcggcgcgtcttaagcatgcaagtcgagcggtaagattggtgcttgcactaatcctagagcggcggactggtgagtaacgcgtgggtgacgtacctttgtgacggggacagctcctagaaataggagataataccggatacgctgcatgttgtcagaggacatgcaggaaaggatcttttgattcgcacagaga

SEQ ID NO: 2475 - DNA, 225 bp, Unknown
  bacterial strain Ascusb_7730 encodes 16S rRNA
agagtttgatcatggctcaggatgaacgctggcggcatgcctaagacatgcaagtcgtacgaggtgtcccattgaagtggagtgcttgcacaaagcggatttggattcacacctagtggcgcaagggtgagtaacacatgggtaatctgccctggagactggaataacaattagaaatgattgctaatgccggatgatatataagaggatacgttctcttatagt

SEQ ID NO: 2476 - DNA, 225 bp, Unknown
  bacterial strain Ascusb_1380 encodes 16S rRNA
agagtttgatcatggctcaggacgaacgctggcggcgtgcctaacacatgcaagtcgaacggaactgctttgaaagaatcttcggatgattgagattcagtttagtggcggacgggtgagtaacgcgtgagtaacctgccttcgagaggggaataacgttctgaaaagatcgctaataccgcatgacatattgaaatcgcatggttttgatatcaaagatttatc

SEQ ID NO: 2477 - DNA, 225 bp, Unknown
  bacterial strain Ascusb_6471 encodes 16S rRNA
agagtttgatcatggctcaggatgaacgctagctacaggcttaacacatgcaagtcgaggggcagcatgatcttagcttgctaagattgatggcgaccggcgcacgggtgagtaacgcgtatccaaccttccctatagtagaggatagcccggcgaaagtcggattaatactctatgttttccgttgcagacatctaaaatggaacaaaggtttaccgctatagg

SEQ ID NO: 2478 - DNA, 225 bp, Unknown
  bacterial strain Ascusb_1414 encodes 16S rRNA
agagtttgatcatggctcaggatgaacgctggcggcgtgcttaacacatgcaagtcgaacgaagcacctctaattgaagattgacgaagcttgcttctgattgattcgccttgaggtgactgagtggcggacgggtgagtaacgcgtgggtaacctaccctatacagggggataacagttggaaacagctgctaataccgcataagcgcacagcttcgcatgaag

SEQ ID NO: 2479 - DNA, 225 bp, Unknown
  bacterial strain Ascusb_2313 encodes 16S rRNA
agagtttgatcatggctcaggatgaacgctggcggcgtgcctaacacatgcaagtcgaacgaagcgtcccgcccgaagagaaggagtgcttgcacaaatttaattcaattgggatgacttagtggcggacgggtgagtaacgcgtgggtaacctgccttatacagggggataacagttagaaatgactgctaataccgcataagcgcacagtatcgcatggtaca

SEQ ID NO: 2480 - DNA, 225 bp, Unknown
  bacterial strain Ascusb_12755 encodes 16S rRNA
agagtttgatcctggctcaggatgaacgctggcggcgtgcttaacacatgcaagtcgaacggaactggttttgaagatttccttcgggaatgattcgttactagtttagtggcggacgggtgagtaacgcgtgagtaacctgcccttgagagggggataacgttctgaaaagaacgctaataccgcataacattatcgagtcgcatggcttgataatcaaaactg

SEQ ID NO: 2481 - DNA, 225 bp, Unknown
  bacterial strain Ascusb_13706 encodes 16S rRNA
agagtttgatcatggctcaggacgaacgctggcggcgtgcctaacacatgcaagtcgaacggacgaggggagcttgctccctgagttagtggcgaacgggtgagtaacgcgtgagcaacctgcctttcagagggggacaacggttggaaacgaccgctaataccgcatgaagcaatcggaccgcatgatctgattgccaaagattttatcgctgaaagatgggct

SEQ ID NO: 2482 - DNA, 225 bp, Unknown
  bacterial strain Ascusb_1858 encodes 16S rRNA
agagtttgatcatggctcagaacgaacgctggcggcgcgtcttaagcatgcaagtcgagcggtaagattggtgcttgcactaatcctagagcggcggactggtgagtaacgcgtgggtgacgtaccttcgtgacggggacagctcctagaaataggagataataccggatacgctgtatgttgtcagaggacatacaggaaaggatcttttgattcgcacggaga

SEQ ID NO: 2483 - DNA, 225 bp, Unknown
  bacterial strain Ascusb_2440 encodes 16S rRNA
agagtttgatcatggctcagaacgaacgctggcggcgcgtcttaagcatgcaagtcgagcgggaagaagtagcttgctatttctgagagcggcggactggtgagtaacacgtggatgacgcacccttctgacggggacagcccgtggaaacacggagtaataccggatgagcccttacttgttagaggagtaaggggaaaggagctaaggcttcgcaggaggagc

SEQ ID NO: 2484 - DNA, 225 bp, Unknown
  bacterial strain Ascusb_3048 encodes 16S rRNA
agagtttgatcatggctcaggatgaacgctagcggcaggcttaacacatgcaagtcgaggggcagcgcgaggtagcaatactttggcggcgaccggcggaagggtgcgtaacgcgtgagcaacttgcccgtatctgggacataaccggtggaaacgccgactaatttcccataacaacagagaagacatcttttttgtttgaaagcttcggtggatacggatggg

SEQ ID NO: 2485 - DNA, 225 bp, Unknown
  bacterial strain Ascusb_3264 encodes 16S rRNA
agagtttgatcatggctcaggatgaacgctagctacaggcttaacacatgcaagtcgaggggcagcatgaagtcagcttgctgactttgatggcgaccggcgcacgggtgcgtaacacgtatccaatctgcccgttacccggggatagcctttcgaaagaaagattaatacccgatggcttcacaccgccgcatggcgttgtgaataaagattcatcggtaacgg

SEQ ID NO: 2486 - DNA, 225 bp, Unknown
  bacterial strain Ascusb_2705 encodes 16S rRNA
agagtttgatcctggctcaggatgaacgctggcggcacgcctaacacatgcaagtcgaacggagcttattgaagcttgctttaataaacttagtggcggacgggtgagtaacacgtgagcaacctgcctttcagagagggatagcttctggaaacggatggtaatacctcataacatattggtacggcatcgtattaatatcaaagatttatcgctgaaagatgg

SEQ ID NO: 2487 - DNA, 225 bp, Unknown
  bacterial strain Ascusb_2711 encodes 16S rRNA
agagtttgatcatggctcaggatgaacgctggcggcgtgcctaacacatgcaagtcgaacgggaactccaagatgagacttcggtggatttttggaaattctagtggcggacgggtgagtaacgcgtgggtaacctgcccttaagaggtgaataacaacgagaaatcggtgctaatacaccatatgcttactagtgtcgcatgacatagtgaggaaagaatttcg

SEQ ID NO: 2488 - DNA, 225 bp, Unknown
  bacterial strain Ascusb_1980 encodes 16S rRNA
agagtttgatcatggctcagaacgaacgctggcggcgcgtcttaagcatgcaagtcgaacgggattcaggggcttgcccctgatgagagtggcggactggtgagtaacacgtaggtgacatgccttttggttggggatagcctgtggaaacacagggtaataccgaataagaccgcggattctgatccgcggtgaaaggagctccggctccgccgatagattggc

SEQ ID NO: 2489 - DNA, 225 bp, Unknown
  bacterial strain Ascusb_4975 encodes 16S rRNA
agagtttgatcctggctcagaacgaacgctggcggcaggcttaacacatgcaagttgaacgggatttgatggtagcttgctatcattaatgagagtagcgcactggtgagtaacacgtgggaacgtacattgtagtgggggacaacagagggaaacttctgctaataccgcataatccctgagggggaaagatttatcgctataatatcggcccgcggaagatta

SEQ ID NO: 2490 - DNA, 225 bp, Unknown
  bacterial strain Ascusb_733 encodes 16S rRNA
agagtttgatcatggctcaggatgaacgctggcggcgtgcctaacacatgcaagtcgaacgaagcacttttaccggagattcgtcgaaggtgaatttgacttagtggcggacgggtgagtaatgtatgagcaacctgcctttcagtgggggacaacagttggaaacgactgctaataccgcataatgtatcgagggggcatccccatgataccaaaggagtaatt

SEQ ID NO: 2491 - DNA, 225 bp, Unknown
  bacterial strain Ascusb_2295 encodes 16S rRNA
agagtttgatcatggctcaggatgaacgctagctacaggcttaacacatgcaagtcgaggggcagcatgaagtttgcttgcaaactttgatggcgaccggcgcacgggtgagtaacgcgtatccaaccttccccttagtagggcatagcccggcgaaagtcggattaataccctatgttgtcttatgaggacatctgagcaagactaaagatttatcgctaaggg

SEQ ID NO: 2492 - DNA, 225 bp, Unknown
  bacterial strain Ascusb_2191 encodes 16S rRNA
agagtttgatcctggctcaggatgaacgctggcggcgtgcttaacacatgcaagtcgaacggagcttatttggaaagcttgcttttcgtttaagcttagtggcggacgggtgagtaacgcgtgagcaacctgccctagagtggggaataacaccgagaaatcggtgctaataccgcataatgtcggaggaccgcatgatccaccgaccaaaggatttattcgctt

SEQ ID NO: 2493 - DNA, 225 bp, Unknown
  bacterial strain Ascusb_3606 encodes 16S rRNA
agagtttgatcatggctcaggatgaacgctagcggcaggcttaacacatgcaagtcgaggggcagcagggagtagcaatactctgctggcgaccggcgcacgggtgcgtaacgcgtatgcaacctaccctttacagggggataactcggggaaacccggactaataccccatatggtcacagaatcgcatggttttgtgacgaaagcttcggtggtatgggatgg

SEQ ID NO: 2494 - DNA, 225 bp, Unknown
  bacterial strain Ascusb_798 encodes 16S rRNA
agagtttgatcatggctcaggatgaacgctggcggcgtgcttaacacatgcaagtcgaacggagcttacttggaaagcttgcttttcttttaagcttagtggcggacgggtgagtaacgcgtgagcaacctgcccttcagtggggaataacaccgagaaatcggtgctaataccgcataatgtcggaggaccgcatgatcttccgaccaaaggatttattcgctg

SEQ ID NO: 2495 - DNA, 225 bp, Unknown
  bacterial strain Ascusb_2415 encodes 16S rRNA
agagtttgatcatggctcaggacgaacgctggcggcgtgcctaacacatgcaagtcgaacggagatattgcagatgaagatttcggttggattcagtaatatcttagtggcggacgggtgagtaacgcgtgagtaacctgccgatgagagtggaataacgttctgaaaagaacgctaataccgcataacatatatttgccgcatgacagatatatcaaagatttt

SEQ ID NO: 2496 - DNA, 225 bp, Unknown
  bacterial strain Ascusb_15630 encodes 16S rRNA
agagtttgatcatggctcaggataaacgctggcggcgcacataagacatgcaagtcgaacggaagtcgttatactgattttgaaaagaacggagaacttgttcaaagggactggaagaagatttataacaatggctttagtggcggactggtgagtaatacgtaagcaacctacctattagaggggaacaacagttagaaatgactgctaataccgcatatgcca

SEQ ID NO: 2497 - DNA, 225 bp, Unknown
  bacterial strain Ascusb_9342 encodes 16S rRNA
agagtttgatcatggctcaggatgaacgctggcggcatgcctaagacatgcaagtcgtacgaagtggccctttgaagtagagtgcttgcacaaagcggataaggattttcacttagtggcgcaagggtgagtaacacgtgggttatctgccttggagactggaataacaattggaaacgattgctaatgccggatgatatgtaagatgatacgttatcttatatt

SEQ ID NO: 2498 - DNA, 225 bp, Unknown
  bacterial strain Ascusb_13928 encodes 16S rRNA
agagtttgatcctggctcaggacgaacgctggcggcgtgcttaacacatgcaagtcgagcggggacatgagggaataagcttcggcagaaagaatcatgttctagcggcggacgggtgagtaacgcgtgagcaatctgtcccagacagggggataacacttggaaacaggtgctaataccgcataagaccacgagatggcatcgtcttggggtaaaaggggagac

SEQ ID NO: 2499 - DNA, 225 bp, Unknown
  bacterial strain Ascusb_5721 encodes 16S rRNA
agagtttgatcatggctcaggatgaacgctagctacaggcttaacacatgcaagtcgaggggcagcatgctgatagcttgctatcggtgatggcgaccggcgcacgggtgcgtaacacgtatccaatctacccatagctctgggatagcctttcgaaagaaagattaataccggatggtctgtcacggagacatctctgtgtcagtaaagatttatcggcgatgg

SEQ ID NO: 2500 - DNA, 225 bp, Unknown
  bacterial strain Ascusb_1784 encodes 16S rRNA
agagtttgatcctggctcaggatgaacgctagctacaggcttaacacatgcaagtcgaggggcagcatgagagtagcttgctactcttgatggcgaccggcgcacgggtgcgtaacacgtatccaatctacccatggctcgggaatagcctttcgaaagaaagattaatgcccgatggtctgtgattgagacatctcgatgacagtaaagattaatcggcgatgg

SEQ ID NO: 2501 - DNA, 225 bp, Unknown
  bacterial strain Ascusb_1940 encodes 16S rRNA
agagtttgatcatggctcaggatgaacgctggcggcgcatttaagacatgcaagtcgaacgaaaatttacgcttaaagagttgattagtttactaagagatgatttattgtaaattttagtggcggactggtgagtaatacataggtaatctgccttttagaggggaataactaggagaaattctagctaataccgcgtaagaccacacttaggcatctaagaga

SEQ ID NO: 2502 - DNA, 225 bp, Unknown
  bacterial strain Ascusb_2326 encodes 16S rRNA
agagtttgatcatggctcaggacgaacgctggcggcgtgcttcatacatgcaagtcgaacgagaagctgacttcggtcagtggaaagtggcggacgggtgagtaatatgtaggaaatctgccctagagagggggacaacagagggaaacttctgctaataccccatatgagcttagttgaaatactaatcttgaaaactccggtgctctaggatgagcctgcatc

SEQ ID NO: 2503 - DNA, 225 bp, Unknown
  bacterial strain Ascusb_193 encodes 16S rRNA
agagtttgatcatggctcaggatgaacgctagctacaggcttaacacatgcaagtcgagcggaacttcttcggaagtttagcggcagacgggtgagtaacacgtatccaacctttcccttactcgggtatagcctcgggaaactgagagtaatccccgatgaagtgtacgaggagcattttttgcacaccaaagattaatcggtgaggggtggggatgcgttcca

SEQ ID NO: 2504 - DNA, 225 bp, Unknown
  bacterial strain Ascusb_6229 encodes 16S rRNA
agagtttgatcatggctcaggattaacgctggcggcatgcctaagacatgcaagtcgaacgaagcgccccattgagaactgaatgaagttggcgagcttgctcaaagatggaatgacgtaggatttggattctgcgcttagtggcgaacgggtgagtaacacgtgggttacctgccttcaagctggggataacagctagaaatggttgctaataccgaatgtgct

SEQ ID NO: 2505 - DNA, 225 bp, Unknown
  bacterial strain Ascusb_2686 encodes 16S rRNA
agagtttgatcatggctcaggatgaacgctagcgacaggcctaacacatgcaagtcgaggggcagcgagaggaaagcttgcttttcttgtcggcgaccggcgcacgggtgagtaacgcgtatgcaacctggctactgctacgggatagccttgcgaaagtaagattaataccgtatgtgatatttagagacatctccttatattgaaagatttatcggcagtaga

SEQ ID NO: 2506 - DNA, 225 bp, Unknown
  bacterial strain Ascusb_3879 encodes 16S rRNA
agagtttgatcatggctcaggatgaacgctagcggcaggcctaacacatgcaagtcgaggggtaacgcgaggtagcaataccttggcgacgaccggcgcacgggtgcgtaacgcgtatgcaacctgccctgtacagggggataacggggtgaaaatcccactaatatcccatggtgtcgcgaggccgcatgaccttgtgactaaagcttcggtggtacaggatgg

SEQ ID NO: 2507 - DNA, 225 bp, Unknown
  bacterial strain Ascusb_19362 encodes 16S rRNA
agagtttgatcatggctcaggatgaacgctggcggcgtgcctaacacatgcaagtcgaacggtgatgatttgatattttcggatggattttcatcatagtggcggacgggtgagtaacgcgtggataacctgcctcgtactggggaatagcagctggaaacggctggtaataccgcataagcgcacggtgccgcatgacattgtgtgaaaagatttatcggtacg

SEQ ID NO: 2508 - DNA, 225 bp, Unknown
  bacterial strain Ascusb_158 encodes 16S rRNA
agagtttgatcctggctcaggacgaacgctggcggcacgcctaacacatgcaagtcgaacggagatattttggtttactgagatatcttagtggcggacgggtgagtaacacgtgagcaacctgcctctgagagagggatagcttctggaaacggatggtaatacctcatgacataacgaagccgcatgactttgttatcaaagatttatcactcagagatgggc

SEQ ID NO: 2509 - DNA, 225 bp, Unknown
  bacterial strain Ascusb_9933 encodes 16S rRNA
agagtttgatcatggctcaggatgaacgctagctacaggcttaacacatgcaagtcgaggggcagcatgaagtcagcttgctgactttgatggcgaccggcgcacgggtgcgtaacacgtatccaatctacccatggctcgggaatagcctttcgaaagaaagattaatgcccgatggtcttacggagagacatctctctgtaagtaaagatttatcggcgatgg

SEQ ID NO: 2510 - DNA, 225 bp, Unknown
  bacterial strain Ascusb_3718 encodes 16S rRNA
agagtttgatcctggctcaggatgaacgctagctacaggcttaacacatgcaagtcgaggggcagcattgggatagcttgctattccagatggcgaccggcgcacgggtgagtaacgcgtatccaaccttccccatagtagggcacagcccggcgaaagtcggattaattccctatgttgtccagagaagacatctgacctggacgaaagattcatcgctatggg

SEQ ID NO: 2511 - DNA, 225 bp, Unknown
  bacterial strain Ascusb_7836 encodes 16S rRNA
agagtttgatcctggctcaggatgaacgctggcggcgtgcctaacacatgcaagtcgaacgaagcactgggaacggagattcgtcgaagtttcctttgacttagtggcggacgggtgagtaatgtatgagcaacctgcctttcagagggggacaacagttggaaacgactgctaataccgcataacgtatagacgagacatcttgtttataccaaaggagcaatc

SEQ ID NO: 2512 - DNA, 225 bp, Unknown
  bacterial strain Ascusb_2381 encodes 16S rRNA
agagtttgatcatggctcaggatgaacgctggcggcatgcctaagacatgcaagtcgtacgaagttgcccattgaaatggagtgcttgcacaaagtggatttggatcacaacttagtggcgaaagggtgagtaacacgtgggttatctacctcagagactgggataacagttggaaacgattgctaataccggattatatgtaagacgatacgttgtcttatatt

SEQ ID NO: 2513 - DNA, 225 bp, Unknown
  bacterial strain Ascusb_2569 encodes 16S rRNA
agagtttgatcctggctcaggatgaacgctagctacaggcttaacacatgcaagtcgaggggcagcatgttggttgcttgcaaccaatgatggcgaccggcgcacgggtgagtaacgcgtatccaaccttccctatagtagaggatagcccggcgaaagtcggattaatactctatgttttccaatgcagacatctaaaatggaacaaaggtttaccgctatagg

SEQ ID NO: 2514 - DNA, 225 bp, Unknown
  bacterial strain Ascusb_6663 encodes 16S rRNA
agagtttgatcatggctcaggacgaacgctggcggcgtgcttaacacatgcaagtcgaacggagttataacggatgagagcttcggcaggattccgatataactcagtggcggacgggtgagtaacgcgtgagcaacctgtcccagacagggggataacacttggaaacaggtgctaataccgcataagaccacggcatcacatggtgcaggggtaaaaggtgca

SEQ ID NO: 2515 - DNA, 225 bp, Unknown
  bacterial strain Ascusb_11848 encodes 16S rRNA
agagtttgatcatggctcaggatgaacgctggcggcatgcctaagacatgcaagtcgaacgaggtggccctttgagggatgagtgcttgcacaaatcctaaaaaggattttccacctagtggcagacgggtgagtaacacgtgggtgacctacctttaagttggggataacagttggaaacgattgctaataccgaatgagatataacagtcgatgttatattga

SEQ ID NO: 2516 - DNA, 225 bp, Unknown
  bacterial strain Ascusb_12803 encodes 16S rRNA
agagtttgatcatggctcaggatgaacgctagctacaggcttaacacatgcaagtcgaggggcagcatgatcttagcttgctaagattgatggcgaccggcgcacgggtgagtaacgcgtatccaaccttccctatagtagaggatagcccggcgaaagtcggattaatactctatgttattcaatgcggacatctaagttgaatcaaaggtttaccgctatagg

SEQ ID NO: 2517 - DNA, 225 bp, Unknown
  bacterial strain Ascusb_957 encodes 16S rRNA
agagtttgatcatggctcagaacgaacgctggcggcgcgtcttaagcatgcaagtcgagcggtaagttgtagcttgctacaacctagagcggcggactggtgagtaacgcgtgggtgacgtacccttgtgacggggacagctcctagaaataggagataataccggatacgctgtgcattgtcagaggatgtacaggaaaggatcttttgatccgcacgaggagc

SEQ ID NO: 2518 - DNA, 225 bp, Unknown
  bacterial strain Ascusb_686 encodes 16S rRNA
agagtttgatcatggctcaggacgaacgctggcggcgtgcctaacacatgcaagtcgaacggagttattttgaatgaaaatttcggttggattttaaagtgacttagtggcggacgggtgagtaacgcgtgagtaacctgcctagaagagggggataacgttctgaaaagaacgctaataccgcataatatatcgaagccgcatgactttgatatcaaaggagca

SEQ ID NO: 2519 - DNA, 225 bp, Unknown
  bacterial strain Ascusb_2674 encodes 16S rRNA
agagtttgatcatggctcaggatgaacgctagctacaggcttaacacatgcaagtcgaggggcagcaggaatctagcttgctagatttgctggcgaccggcgcacgggtgagtaacgcgtatccaaccttccccatagtagaggatagcccggcgaaagtcggattaatactctatgttgtattttgaggacatctgacgaataccaaagattgatcgctatggg

SEQ ID NO: 2520 - DNA, 225 bp, Unknown
  bacterial strain Ascusb_4087 encodes 16S rRNA
agagtttgatcctggctcagaacgaacgctggcggcgcgtcttaagcatgcaagtcgagcggcaagttgtagcttgctacaacctagagcggcggactggtgagtaacacgtgggtgacgcacccgggggaccgggatagcccttagaaataaggggtaataccggatacgaccgcaggcttggaggcctgcgaggaaaggggctctggccccgcccgcggaacg

SEQ ID NO: 2521 - DNA, 225 bp, Unknown
  bacterial strain Ascusb_4454 encodes 16S rRNA
agagtttgatcctggctcaggatgaacgctagcgacaggcttaacacatgcaagtcgaggggcagcatgggaggtggcaacaccacccgatggcgaccggcgcactggtgagtaacacgtatgcgacctgcccccttcaggggaataacccggagaaatccggcctaatgccccatagtccgcggggactcattgccctgcggggaaaggtgagccggaagggga

SEQ ID NO: 2522 - DNA, 225 bp, Unknown
  bacterial strain Ascusb_19701 encodes 16S rRNA
agagtttgatcatggctcagattgaacgctggcggcaggcttaacacatgcaagtcgtacggtaacagagggaagcttgcttctctgctgacgagtggcggacgggtgagtaatgtctgggaagctgcctgcttgagggggatagcggagcgaaagttccgataataccgcgtaagcccgagaggggaaagtgcgggaccgcaaggccgcacgcgagcagatgcg

SEQ ID NO: 2523 - DNA, 225 bp, Unknown
  bacterial strain Ascusb_1521 encodes 16S rRNA
agagtttgatcatggctcaggacgaacgctggcggcatgcttaacacatgcaagtcgaacggatctgattccttcgggatgaaagattagtggcggacgggtgagtaatgtatgagcaatctgcccttgtcattgggataacatagggaaacttatgctaataccaaatatgaccacggtatcgcatggtactgcggtgaaagctccggcggacaaggatgagct

SEQ ID NO: 2524 - DNA, 225 bp, Unknown
  bacterial strain Ascusb_679 encodes 16S rRNA
agagtttgatcatggctcaggataaacgctggcggcgtgcctaatacatgcaagtcgatcgctggagctcaagcttgcttgagtgaaggagaggcgaacgggtgagtaatacataagcaacctgcccacgaagactgggataatctctggaaacggggactaataccggataggtaacggagtcgcatgacactgttattaaagattcaaagcactggtggatgg

SEQ ID NO: 2525 - DNA, 225 bp, Unknown
  bacterial strain Ascusb_901 encodes 16S rRNA
agagtttgatcatggctcaggatgaacgctggcggcgtgcttaacacatgcaagtcgaacgaggttattacagttgaagttttcggatggaaaccgttttaaccgagtggcggacgggtgagtaacgcgtgggaaacctgccctattccgggggataccagttggaaacgactgttaataccgcataagcgcacagcatcgcatgatgcagtgtgaaaaactccg

SEQ ID NO: 2526 - DNA, 225 bp, Unknown
  bacterial strain Ascusb_3265 encodes 16S rRNA
agagtttgatcatggctcaggataaacgctggcggcgcacataagacatgcaagtcgaacggaagtcgttatattgattttgaaatgaacgttgaacttgttcaaggggacttgatgaagatttataacaatggctttagtggcggactggtgagtaatacgtaagcaacctgcctattagaggggaacaacagttagaaatgactgctaataccgcatatgcca

SEQ ID NO: 2527 - DNA, 225 bp, Unknown
  bacterial strain Ascusb_4773 encodes 16S rRNA
agagtttgatcctggctcaggatgaacgctagcggcaggcctaacacatgcaagtcgaggggtaacgcgaggtagcaatactttggcgacgaccggcgcacgggtgcgtaacgcgtatgcaacctgccctgtacagggggataacggggtgaaaatcccactaatatcccatagtgccacgggatcgcatggttttgtggctaaagcttcggtggtacaggatgg

SEQ ID NO: 2528 - DNA, 225 bp, Unknown
  bacterial strain Ascusb_1840 encodes 16S rRNA
agagtttgatcatggctcaggatgaacgctggcggcgtgcttaacacatgcaagtcgaacggaacttttctcccgaagaagcggagtgcttgcacaaagtggattcatttgaaaagtttagtggcggacgggtgagtaacgcgtgggtaacctgccgtatgccgggggacaacagttggaaacgactgctaataccgcataagcgcacactatcgcatgatagag

SEQ ID NO: 2529 - DNA, 225 bp, Unknown
  bacterial strain Ascusb_894 encodes 16S rRNA
agagtttgatcatggctcaggatgaacgctagcgacaggcctaacacatgcaagtcgaggggcagcgagaggaaagcttgcttttcttgtcggcgaccggcgcacgggtgagtaacgcgtatgcaacctggctactgctacgggatagccttgcgaaagtaagattaataccgtatgtgctgagtttagacatctttattcagtgaaagatttatcggcagtaga

SEQ ID NO: 2530 - DNA, 225 bp, Unknown
  bacterial strain Ascusb_1228 encodes 16S rRNA
agagtttgatcatggctcaggatgaacgctagcggcaggcttaacacatgcaagtcgaggggtaacagggcgtagcaatacgctgctgacgaccggcgcacgggtgcgtaacgcgtatgcaacctacctgtaacagggggataacggagtgaaaattccactaataccccatattgttattctttcgcatgttaggataacgaaagcttcggtggttacggatgg

SEQ ID NO: 2531 - DNA, 225 bp, Unknown
  bacterial strain Ascusb_874 encodes 16S rRNA
agagtttgatcatggctcaggacgaacgctggcggcatgcctaacacatgcaagtcgaacggagttaagagagcttgcttttttaacttagtggcggacgggtgagtaacgcgtgagcaacttgcctctcggtggggaataatgtactgaaaaggacactaataccgcatgatgtgcagagatcgcatggtcattgcaccaaagatttatcgccgagagatgggc

SEQ ID NO: 2532 - DNA, 225 bp, Unknown
  bacterial strain Ascusb_10476 encodes 16S rRNA
agagtttgatcatggctcaggacgaacgctggcggcgtgcttaacacatgcaagtcgaacggggattattgggatgagagcttcggcaggatttctgataattccagtggcggacgggtgagtaacgcgtgagcaacctgtcccagacagggggataacacttggaaacaggtgctaataccgcataagaccacggggtcacatggcccaggggtaaaaggagca

SEQ ID NO: 2533 - DNA, 225 bp, Unknown
  bacterial strain Ascusb_4846 encodes 16S rRNA
agagtttgatcatggctcagaacgaacgctggcggcgcgtcttaagcatgcaagtcgaatggcaagaagagagcttgctctcttcctagaatggcggactggtgagtaacgcgtgggtgacgtaccctttagctggggatagcttttagaaataagagataataccgaataagctgcattttgttagagggaatgcaggaaaggatctttagattcactgaagga

SEQ ID NO: 2534 - DNA, 225 bp, Unknown
  bacterial strain Ascusb_15001 encodes 16S rRNA
agagtttgatcctggctcaggacgaacgctggcggcgtgcctaacacatgcaagtcgagcggggacatacagtgaagaggaagttttcggatggaattggaacggtatgttctagcggcggacgggtgagtaacgcgtgagcaacctgtccttcacagggggataacacagcgaaagttgtactaataccgcataagaccacggagctgcatggctttggggtca

SEQ ID NO: 2535 - DNA, 225 bp, Unknown
  bacterial strain Ascusb_5315 encodes 16S rRNA
agagtttgatcatggctcaggatgaacgctagctacaggcttaacacatgcaagtcgaggggcagcaggacgatagcttgctattgttgctggcgaccggcgcacgggtgagtaacgcgtatccaaccttccctatagtagagaatagcccggcgaaagtcggattaatgctctatgttgtgttttgatgacatctgacgaacaccaaaggttcaccgctatagg

SEQ ID NO: 2536 - DNA, 225 bp, Unknown
  bacterial strain Ascusb_7842 encodes 16S rRNA
agagtttgatcctggctcaggatgaacgctagcggcaggcttaacacatgcaagtcgaggggcagcgggtttgtagcaatacagacgccggcgaccggcgcaagggtgcgtaacgcgtgagcgacatgcccgtgaccgggggataaccgatggaaacgtcgcctaaccccccatatgacgagggaccgcatgatcccttgttgaaaaccctggtggtcacggatt

SEQ ID NO: 2537 - DNA, 225 bp, Unknown
  bacterial strain Ascusb_9565 encodes 16S rRNA
agagtttgatcatggctcaggatgaacgctggcggcatgcctaagacatgcaagtcgtacgaggcgtcccattgaaatggagtgcttgcacaaagtggatttggattttcgcctagtggcgcaagggtgagtaacacgtgggttatctgccttgaagactggaataacaattggaaacgattgctaatgccggatgatatataaaaggatacgttcttttatagt

SEQ ID NO: 2538 - DNA, 225 bp, Unknown
  bacterial strain Ascusb_12486 encodes 16S rRNA
agagtttgatcctggctcaggataaacgctggcggcgcacataagacatgcaagtcgaacggaagtcgtcataatgattttgaaatggatttgaagatttatctgatatgaagttgatgatgatttatgacaatggctttagtggcggactggtgagtaacgcgtaagcaatctgcctattagaggggaataacagtgagaaatcattgctaataccgcatatgc

SEQ ID NO: 2539 - DNA, 225 bp, Unknown
  bacterial strain Ascusb_4058 encodes 16S rRNA
agagtttgatcatggctcaggatgaacgctagcggcaggcttaacacatgcaagtcgaggggtaacgcggggtagcaatactctggcgacgaccggcgcacgggtgcgtaacgcgtatgcaacctacctgtaacaggggtataacggagtgaaaattccactaatcccccatattgttagagattcgcatgtttctctaacgaaagcttcggtggttacggatgg

SEQ ID NO: 2540 - DNA, 225 bp, Unknown
  bacterial strain Ascusb_1169 encodes 16S rRNA
agagtttgatcatggctcagaacgaacgctggtggcgtgtcttatacatgcaagtcgagcgaggcagcaatgccgagcggcgaacgggtgagtaacgcgtaagcaatctgccccatatcaggaaatacccgtgccaacgcgcggttaatgtccaggagagtggctccttgcatgaggagttgactagagatttatcggtatgggatgagcttgcgtccgattagc

SEQ ID NO: 2541 - DNA, 225 bp, Unknown
  bacterial strain Ascusb_1684 encodes 16S rRNA
agagtttgatcctggctcaggataaacgctggcggcgtgcctaatacatgcaagtcgaacgctggagaccgacttcggttggtcgaaggagtggcgaacgggtgagtaatacataagcaacctgcccacgaagaccgggataatccctggaaacggggactaataccggataggcatttgagaggcatctcttaaatgttaaagattaaaagcactggtggatgg

SEQ ID NO: 2542 - DNA, 225 bp, Unknown
  bacterial strain Ascusb_983 encodes 16S rRNA
agagtttgatcatggctcaggacgaacgctggcggcgtgcttaacacatgcaagtcgaacgaggttattttgatgagatcttcggaaggattcgggataaccgagtggcggacgggtgagtaacgcgtgagcaacctgtcttacacagggggataacgctccgaaaggagtgctaataccgcataggaccacggagctgcatggctttgaggtgaaaggagcaat

SEQ ID NO: 2543 - DNA, 225 bp, Unknown
  bacterial strain Ascusb_12658 encodes 16S rRNA
agagtttgatcctggctcaggatgaacgctagctacaggcttaacacatgcaagtcgaggggcatcatggagtttgcttgcaaactccgatggcgaccggcgcacgggtgagtaacgcgtatccaaccttccccttagtagggcatagcccggcgaaagtcggattaataccctatgttgtcgtttgaagacatctgaagacgattaaagattcatcgctaaggg

SEQ ID NO: 2544 - DNA, 225 bp, Unknown
  bacterial strain Ascusb_2927 encodes 16S rRNA
agagtttgatcatggctcagaacgaacgctggcggcgcgtcttaagcatgcaagtcgagcggtaagtcgggagcttgctcctgacctagagcggcggactggtgagtaacgcgtgggtgacgtacctttatgacggggacagctcctagaaataggagataataccggatacgctgtgtgttgtcagaggacacacaggaaaggatcttttgattcgcataaaga

SEQ ID NO: 2545 - DNA, 225 bp, Unknown
  bacterial strain Ascusb_1281 encodes 16S rRNA
agagtttgatcctggctcaggatgaacgctggcggcgtgcctaacacatgcaagtcgagcggagttatattttcggatttaacttagcggcggatgggtgagtaacgcgtggataacctgccctgctcagggggataacagttggaaacgactgttaataccgcatatgcacacagtaccgcatggtacagggtggaaagattttatcggagcaggatggatccg

SEQ ID NO: 2546 - DNA, 225 bp, Unknown
  bacterial strain Ascusb_12147 encodes 16S rRNA
agagtttgatcatggctcaggatgaacgctggcggcatgcctaagacatgcaagtcgaacgaagtggcccaatgaagaatgcgagcttgctcaagtttggatttggattcccacttagtggcgcaagggtgagtaacacgtgggtaatctaccttcgagtctggaataacagttagaaatgattgctaatgccggatgatatcgagaacgatacgtctttcttta

SEQ ID NO: 2547 - DNA, 225 bp, Unknown
  bacterial strain Ascusb_4082 encodes 16S rRNA
agagtttgatcatggctcagaacgaacgctggcggcgcgtcttaagcatgcaagtcgaacggcaagattggtgcttgcaccgatcctagagtggcggactggtgagtaacgcgtgggtgatgtaccctttggatggggatagccggtagaaataccgggtaataccgaataagcttgcttctttaatgtgaagtaaggaaagcagtgtatgctgcaccgaaggaa

SEQ ID NO: 2548 - DNA, 225 bp, Unknown
  bacterial strain Ascusb_287 encodes 16S rRNA
agagtttgatcatggctcaggatgaacgctggcggcacgcctaacacatgcaagtcgaacggagtttaagagagcttgctcttttaaacttagtggcggacgggtgagtaacacgtgagcaacctgcctttcagagagggatagcttctggaaacggatggtaatacctcataacatattgatacggcatcgtattaatatcaaagatttatcgctgaaagatgg

SEQ ID NO: 2549 - DNA, 225 bp, Unknown
  bacterial strain Ascusb_4056 encodes 16S rRNA
agagtttgatcatggctcaggatgaacgctagcggcaggcttaacacatgcaagtcgaggggcagcgtggcgtagcaatacgctgacggcgaccggcgaaagggtgagtaacgcgtgagcaacatgcccggtagaggaggatagtcgatggaaacgtcgtgtaatactccgtaacaacagaccccgcatgaggtttgtttaatagattaatcgctatcggattgg

SEQ ID NO: 2550 - DNA, 225 bp, Unknown
  bacterial strain Ascusb_2792 encodes 16S rRNA
agagtttgatcatggctcaggatgaacgctggcggcgtgcctaatacatgcaagtcgaacggagaaatcacttcggtgatggatcagtggcgaacgggtgagtaacacatgaacaacctaccctgatgactgggataacgatctgaaaagatcgctaataccggataggtagcggaagggcatccttcttctattaaagttgggctacaacacaacaggatgggt

SEQ ID NO: 2551 - DNA, 225 bp, Unknown
  bacterial strain Ascusb_2780 encodes 16S rRNA
agagtttgatcatggctcaggataaacgctggcggcgcacataagacatgcaagtcgaacgaacttaatcgaatatttatatttgaagcggttagtggcggactggtgagtaacgcgtaggcaacctgcccataagaggggaataacattgagaaatcagtgctaataccgcataagctgtgaacatcgcatgatgaaagcagaaaaggagtaatccgcttatgg

SEQ ID NO: 2552 - DNA, 225 bp, Unknown
  bacterial strain Ascusb_3090 encodes 16S rRNA
agagtttgatcatggctcagattgaacgctggcggcaggcttaatacatgcaagtcgaacggtagcagcaggaaagcttgcttttctggctgacgagtggcggacgggtgagtaatacctgggaaactgcctataagagggggataacacctggaaacgggtgctaataccgcataaaccctgaggggaaaaggatgggaaaccatgcgcttatagatgtgccca

SEQ ID NO: 2553 - DNA, 225 bp, Unknown
  bacterial strain Ascusb_6755 encodes 16S rRNA
agagtttgatcctggctcaggatgaacgctagctacaggcttaacacatgcaagtcgaggggcatcgaggagttagcttgctaactttgtcggcgaccggcgcacgggtgagtaacgcgtatccaaccttccccatagtagaggatagcccggcgaaagtcggattaatactctatgttcttcaatgcggacatctaatttgaagcaaaggttcaccgctatggg

SEQ ID NO: 2554 - DNA, 225 bp, Unknown
  bacterial strain Ascusb_2046 encodes 16S rRNA
agagtttgatcatggctcagaacgaacgctggcggcgcgtcttaagcatgcaagtcgagcgggagatggtagcttgctaccattgagagcggcggactggtgagtaacgcgtgggtgacgtacctttgtgatggggatagctgctagaaatagcagataataccgaatacgctgtgtgttgtcagaggacacacaggaaaggttcttttgaatcgcacaaagagc

SEQ ID NO: 2555 - DNA, 225 bp, Unknown
  bacterial strain Ascusb_2175 encodes 16S rRNA
agagtttgatcatggctcaggacgaacgctggcggcgtgcctaacacatgcaagtcgagcggggatgttggaagagcttgctcggaagacatcttagcggcggacgggtgagtaacgcgtgagcaacctgtcccagacagggggataccagatggaaacatctgctaataccgcataagaccacgggatcacatggttctggggtaaaaggaggaatccggtttg

SEQ ID NO: 2556 - DNA, 225 bp, Unknown
  bacterial strain Ascusb_3050 encodes 16S rRNA
agagtttgatcatggctcaggataaacgctggcggcgcacataagacatgcaagtcgaacggaagtcgttgtaatgatgtggacatgaacagagaacttgttcaaagggagtgaaaattgacttacaacaatggctttagtggcggactggtgagtaatacgtaagcaacctacctattagaggggaacaacagttagaaatgactgctaataccgcatatgcca

SEQ ID NO: 2557 - DNA, 225 bp, Unknown
  bacterial strain Ascusb_888 encodes 16S rRNA
agagtttgatcatggctcaggatgaacgctggcggcgcacataagacatgcaagtcgaacggaagtcgttagaaatgaattgacgatttatctgattgaagtttctaacaatggctttagtggcggactggtgagtaacacgtaagcaacctgcctatcagaggggaataacagtgagaaatcattgctaataccgcataagctagtagtatcgcatgatacagc

SEQ ID NO: 2558 - DNA, 225 bp, Unknown
  bacterial strain Ascusb_15111 encodes 16S rRNA
agagtttgatcatggctcaggatgaacgctagctacaggcttaacacatgcaagtcgaggggcatcgggagagtagcttgctattcttgccggcgaccggcgcacgggtgagtaacgcgtatccaacctaccccatacaagaggatagcccggcgaaagtcggattaatactctatgtagtacgatgaaggcatctgagttgtatgaaaggtttcttccggtatg

SEQ ID NO: 2559 - DNA, 225 bp, Unknown
  bacterial strain Ascusb_132 encodes 16S rRNA
agagtttgatcatggctcaggatgaacgctagctacaggcttaacacatgcaagtcgaggggcagcattgggatagcttgctattccagatggcgaccggcgcacgggtgagtaacgcgtatccaaccttccccatagtagggcacagcccggcgaaagtcggattaattccctatgcagtccagagaggacatctgacctggacgaaagattcatcgctatggg

SEQ ID NO: 2560 - DNA, 225 bp, Unknown
  bacterial strain Ascusb_2925 encodes 16S rRNA
agagtttgatcatggctcaggacgaacgctggcggcgtgcttaacacatgcaagtcgaacgaggttatgtcacggaaggcttcggctggaagagatataaccgagtggcggacgggtgagtaacgcgtgaggaacctgtcttttgcagggggataacggtccgaaaggattgctaataccgcataagaccacgtcggggcatcccggtgaggtcaaaggagaaat

SEQ ID NO: 2561 - DNA, 225 bp, Unknown
  bacterial strain Ascusb_379 encodes 16S rRNA
agagtttgatcatggctcaggatgaacgctagctacaggcttaacacatgcaagtcgaggggcagcattgagatagcttgctatttcagatggcgaccggcgcacgggtgagtaacgcgtatccaaccttccctatagtagagaatagcccggcgaaagtcggattaatgctctatatgttctattgatggcatcagagattgaacaaagaatttcgctatagga

SEQ ID NO: 2562 - DNA, 225 bp, Unknown
  bacterial strain Ascusb_3915 encodes 16S rRNA
agagtttgatcatggctcaggacgaacgctggcggcgtgcttaacacatgcaagtcgaacgaggttatattgaggaaagcttcggccggaatcgatataaccgagtggcggacgggtgagtaacgcgtgagcaacctgtcttctacagggggataacggtccgaaaggattgctaataccgcataagaccacggtactgcatggtacagaggtcaaaggagagat

SEQ ID NO: 2563 - DNA, 225 bp, Unknown
  bacterial strain Ascusb_705 encodes 16S rRNA
agagtttgatcctggctcaggatgaacgctggcggcgtgcttaatacatgcaagtcgaacgaagagcccttaaccgaagatgatgacgtgcttgcactgaatctgattcaccttagggttactgagtggcggacgggtgagtaacgcgtgggtaacctgccttagacagggggataacatcaagaaattggtgctaataccgcatatgctcacagtatcgcatga

SEQ ID NO: 2564 - DNA, 225 bp, Unknown
  bacterial strain Ascusb_1716 encodes 16S rRNA
agagtttgatcatggctcaggatgaacgctggcggcgtgcctaacacatgcaagtcgaacgaagttttagcgacggaagtcttcggacggaagatgttacaacttagtggcggacgggtgagtaacgcgtgagcaacctgcctttcagagggggacaacagttggaaacgactgctaataccgcataacgtatatttatggcatcatagatataccaaaggagca

SEQ ID NO: 2565 - DNA, 225 bp, Unknown
  bacterial strain Ascusb_2767 encodes 16S rRNA
agagtttgatcatggctcaggacgaacgctggcggcgtgcttaacacatgcaagtcgaacgaggatatgtcagaggagagcttcggcaggaatcaggcatattcgagtggcggacgggtgagtaacgcgtgagcaacctgtcccagacagggggataacacttggaaacaggtgctaataccgcataagaccacggtatcacatggtagtggggtaaaaggagca

SEQ ID NO: 2566 - DNA, 225 bp, Unknown
  bacterial strain Ascusb_10632 encodes 16S rRNA
agagtttgatcctggctcaggatgaacgctggcggcatgcctaagacatgcaagtcgtacgaggtggcccgttgaattctgtgcttgcacaaaacgattcggatccccacctagtggcgaaagggtgagtaacacgtgggtaatctacctcagagactgggataactactggaaacggtagctaataccggatgatatatataacgatacgttgttatatagtaa

SEQ ID NO: 2567 - DNA, 225 bp, Unknown
  bacterial strain Ascusb_4360 encodes 16S rRNA
agagtttgatcatggctcaggacgaacgctggcggcgtgcttaacacatgcaagtcgaacgaagcttgatgattgattccttcgggatgatttcagatatgactgagtggcggacgggtgagtaacgcgtgaggaacctgcctttcagagggggacaacgtttggaaacgaacgctaataccgcataacattgccgagtggcatcgcttggcaatcaaagattta

SEQ ID NO: 2568 - DNA, 225 bp, Unknown
  bacterial strain Ascusb_7041 encodes 16S rRNA
agagtttgatcatggctcaggatgaacgctagcggcaggcttaacacatgcaagtcgaggggtaacgcgaggtagcaatactttggcgacgaccggcgcacgggtgcgtaacgcgtatgcaacctgcccgtaacaggggtataacggagggaaacttccactaatcccccatattgttgtggaaccgcatggtttttcaacgaaagcttcggtggttacggatgg

SEQ ID NO: 2569 - DNA, 225 bp, Unknown
  bacterial strain Ascusb_6460 encodes 16S rRNA
agagtttgatcctggctcaggatgaacgctagcggcaggcttaacacatgcaagtcgaggggtaacagagggtagcaataccctgctgacgaccggcgcacgggtgcgtaacgcgtatgcaacctacctgtaacagggggataacggagtgaaaattccactaataccccatattgttggagattcgcatgtttctccaacgaaagcttcggtggttacggatgg

SEQ ID NO: 2570 - DNA, 225 bp, Unknown
  bacterial strain Ascusb_2735 encodes 16S rRNA
agagtttgatcatggctcaggatgaacgctagcgacaggcctaacacatgcaagtcgaggggcagcgcggaggtagcaatatctttggcggcgaccggcgcacgggtgcgtaacaggtgtgcaatctgtccataatcggggaataacccggcgaaagccgaactaacgctccatgtgagcgagcggggcatcctgcttgtttgaaacgtgaggattatgggtgag

SEQ ID NO: 2571 - DNA, 225 bp, Unknown
  bacterial strain Ascusb_1244 encodes 16S rRNA
agagtttgatcatggctcagaacgaacgctggcggcgcgtcttaagcatgcaagtcgagcggtaaggaagaagcttgcttcttccctagagcggcggactggtgagtaacgcgtgggtgacgtacctttgtgacggggacagctcctagaaataggagataataccggatacgctgcagcatgtcagaggtgctgcaggaaaggatcttttgattcgcacagaga

SEQ ID NO: 2572 - DNA, 225 bp, Unknown
  bacterial strain Ascusb_6524 encodes 16S rRNA
agagtttgatcctggctcaggacgaacgctggcggcgtgcttaacacatgcaagtcgaacgaggttattttgatgagatcttcggaaggattcgggataaccgagtggcggacgggtgagtaacgcgtgagcaacctgtcttacacagggggataacgctccgaaaggagtgctaataccgcataggaccacggagctgcatggctttgaggtgaaaggagcaat

SEQ ID NO: 2573 - DNA, 225 bp, Unknown
  bacterial strain Ascusb_1891 encodes 16S rRNA
agagtttgatcatggctcaggacgaacgctggcggcgtgcttaacacatgcaagtcgaacggagttaagcgctggtctgatgccggcttgccggaggatttccttgcttaacttagtggcggacgggtgagtaacgcgtgagtaacctgcccctcagtggggaataacgccctgaaaagagcgctaataccgcataatatatatttgccgcatgacaggtatatc

SEQ ID NO: 2574 - DNA, 225 bp, Unknown
  bacterial strain Ascusb_670 encodes 16S rRNA
agagtttgatcatggctcaggatgaacgctagctacaggcttaacacatgcaagtcgaggggcagcatgttggttgcttgcaaccaatgatggcgaccggcgcacgggtgagtaacgcgtatccaaccttccccttagtagaggatagcccggcgaaagtcggattaatactctatgttcttcaatgcggacatctaagttgaagcaaagatttatcgctaaggg

SEQ ID NO: 2575 - DNA, 225 bp, Unknown
  bacterial strain Ascusb_1396 encodes 16S rRNA
agagtttgatcatggctcaggatgaacgctggcggcgtgcttaacacatgcaagtcgaacgaagcgtcccgcccgatgaaatggagtgcttgcacaaagtagaatcaattgggatgacttagtggcggacgggtgagtaacgcgtgggtaacctgccttacacagggggacaacagttggaaacgactgctaataccgcataacccgctagtaccgcatggtaca

SEQ ID NO: 2576 - DNA, 225 bp, Unknown
  bacterial strain Ascusb_152 encodes 16S rRNA
agagtttgatcatggctcaggacgaacgctggcggcacgcctaacacatgcaagtcgaacggagatttgagagcttgctcttaaatcttagtggcggacgggtgagtaacacgtgagcaacctgcctctgagagagggatagcttctggaaacggatggtaatacctcataacattacatgaccgcatgatcgtgtaatcaaagatttatcactcagagatgggc

SEQ ID NO: 2577 - DNA, 225 bp, Unknown
  bacterial strain Ascusb_3336 encodes 16S rRNA
agagtttgatcatggctcaggatgaacgctggcggcgtgcctaacacatgcaagtcgaacgaagcatacgagacggagattcgtcgaagccttgtatgacttagtggcggacgggtgagtaatgtatgagcaacctgcctttcagtgggggacaacagttggaaacgactgctaataccgcataatgtacagagaggacatcctcattgtaccaaaggagcaatt

SEQ ID NO: 2578 - DNA, 225 bp, Unknown
  bacterial strain Ascusb_5077 encodes 16S rRNA
agagtttgatcatggctcaggataaacgctggcggcgcacataagacatgcaagtcgaacggaagtcgttgtaatgatatggacatgaacggagaacttgttcaaagagattgaaagttgatttacaacaatggctttagtggcggactggtgagtaacacgtaagcaacctgcctatcagaggggaacaacagttagaaatgactgctaataccgcatatgcct

SEQ ID NO: 2579 - DNA, 225 bp, Unknown
  bacterial strain Ascusb_5279 encodes 16S rRNA
agagtttgatcctggctcaggatgaacgctggcggcgtgcctaatacatgcaagtcgaacgaggtgtagcaatacaccgagtggcgaacgggtgagtaacacgtaggtaacctgccttttagtttgggatacccagaggaaactttggctaataccggatatagagctctgaaggcatcttcggagtttgaaaggggcttcggcctcgctttaagatggacctgc

SEQ ID NO: 2580 - DNA, 225 bp, Unknown
  bacterial strain Ascusb_690 encodes 16S rRNA
agagtttgatcatggctcagaacgaacgctggtggcgtgtcttatacatgcaagtcgagcgacgtagcaatacgtagcggcgaacgggtgagtaacgcgtaagcaatctgccccatatcaggaaatacccgtgccaacgcgcggttaatgtccaggagagtggccagctgcatggctggttgactagagatttatcggtatgggatgagcttgcgtccgattagc

SEQ ID NO: 2581 - DNA, 225 bp, Unknown
  bacterial strain Ascusb_3691 encodes 16S rRNA
agagtttgatcatggctcaggacgaacgctggcggcgtgcctaacacatgcaagtcgagcggagacatttcgagaagcggaagttttcggatggaagcagattgggatgttttagcggcggacgggtgagtaacgcgtgagcaacctgtccttcacagggggataacacagcgaaagttgtactaataccgcataagaccacagagtcacatggcttaggggtca

SEQ ID NO: 2582 - DNA, 225 bp, Unknown
  bacterial strain Ascusb_3716 encodes 16S rRNA
agagtttgatcatggctcaggacgaacgctggcggcgtgcttaacacatgcaagtcgagcggagacgtatttcggagagcttcggcaggaagagatgcgtcttagcggcggacgggtgagtaacgcgtgagcaacctgtccttcacagggggataagataccgaaaggtgttctaataccgcatgagaccacaaggccacatggcgaaggggtcaaaggagcaat

SEQ ID NO: 2583 - DNA, 225 bp, Unknown
  bacterial strain Ascusb_992 encodes 16S rRNA
agagtttgatcatggctcaggatgaacgctagctacaggcttaacacatgcaagtcgaggggcagcatagggtttgcttgcaaactctgatggcgaccggcgcacgggtgagtaacgcgtatccaacctgcccatggctagggaatagcccgttgaaaagcggattaatgccctatggggtcctttgcagacatctaacgaggactaaaggtttaccggccatgg

SEQ ID NO: 2584 - DNA, 225 bp, Unknown
  bacterial strain Ascusb_19874 encodes 16S rRNA
agagtttgatcctggctcagattgaacgctggcggcaggcctaatacatgcaagtcgaacggtaacatggaagtagcaatacttttgatgacgagtggcggacgggtgagtaatatttgggaatctacctatcagagggggatagcaactggaaacggttgataagaccgcgtacgctctgaggaggaaagtaatgggatcgcaagaccattagctgatagatga

SEQ ID NO: 2585 - DNA, 225 bp, Unknown
  bacterial strain Ascusb_1189 encodes 16S rRNA
agagtttgatcatggctcaggattaacgctggcggcatgcctaatacatgcaagtcgaatggaagagcttgcttttccatggcgaacgggtgagtaacacgtaggtaacctaccttaaggacgaggataacctttggaaacgaaggataatactggataggacatcataaaacacatgtttagatgtttaaaggagcaatccaccataagaggggcctgcggcgc

SEQ ID NO: 2586 - DNA, 225 bp, Unknown
  bacterial strain Ascusb_1374 encodes 16S rRNA
agagtttgatcatggctcaggatgaacgctagcggcaggcttaacacatgcaagtcgaggggtaacagggagtagcaatactccgctgacgaccggcgcacgggtgcgtaacgcgtatgcaacctacctgtaacaggggtataacggagggaaacttccactaatcccccatattgttgtggattcgcatgtttccacaacgaaagctttctgtggttacggatg

SEQ ID NO: 2587 - DNA, 225 bp, Unknown
  bacterial strain Ascusb_12024 encodes 16S rRNA
agagtttgatcatggctcaggatgaacgctagctacaggcttaacacatgcaagtcgaggggcagcatagggtttgcttgcagactctgatggcgaccggcgcacgggtgagtaacgcgtatccaacctgcccatggctagggaatagcccgttgaaaagcggattaatgccctatggtgtcctttgcagacatctaacgaggactaaaggtttaccggccatgg

SEQ ID NO: 2588 - DNA, 225 bp, Unknown
  bacterial strain Ascusb_2720 encodes 16S rRNA
agagtttgatcatggctcaggatgaacgctagcgacaggcctaacacatgcaagtcgagcggcagcacctcgggtggcgagcggcgcacgggtgagtaacgcgtatgtaacctgcccatgagtgggggatagcccggtgaaaaccggattaataccccatgacaccggaatttgacatcttataccggttaaagattcattgctcatggatggacatgcgttgga

SEQ ID NO: 2589 - DNA, 225 bp, Unknown
  bacterial strain Ascusb_2457 encodes 16S rRNA
agagtttgatcctggctcaggatgaacgctagctacaggcttaacacatgcaagtcgaggggcagcatgggagtagcttgctactcttgatggcgaccggcgcacgggtgcgtaacacgtatccaatctacccatggctcagggatagcctttcgaaagaaagattaatacctgatggtcttacttggagacatctcctagtaagtaaagatttatcggcgatgg

SEQ ID NO: 2590 - DNA, 225 bp, Unknown
  bacterial strain Ascusb_2775 encodes 16S rRNA
agagtttgatcatggctcaggatgaacgctagcggcaggcttaacacatgcaagtcgaggggcagcgcgggtagcaatacttggcggcgaccggcgaaagggtgagtaacgcgtgagcaacatacccgttgatgggggataggaggtggaaacgccttgtaataccccatatgatacgaagtggcatcacattgtattgaaagattcattgtcaacggattggtt

SEQ ID NO: 2591 - DNA, 225 bp, Unknown
  bacterial strain Ascusb_2442 encodes 16S rRNA
agagtttgatcctggctcaggacgaacgctggcggcatgcttcatacatgcaagtcgaacgataaggtctcttcggagatacataagtggcggacgggtgagtaatatgtaggaaatctgccctagagagggggacaacagagggaaacttctgctaataccccatatgagcgtagttgaaatactattcttgaaaactccggtgctctaggatgagcctgcatc

SEQ ID NO: 2592 - DNA, 225 bp, Unknown
  bacterial strain Ascusb_1669 encodes 16S rRNA
agagtttgatcctggctcaggatgaacgctagcgacaggcctaacacatgcaagtcgaggggcagcgcgggagaagcttgcttttcctggcggcgaccggcgcacgggtgcgtaacaggtgtgcaatctgtcctataccggggcatagcccagcgaaagttggattaattctccatgtgagcgagtgccgcatgacacacgcttgaaacgtaagggtatagggtg

SEQ ID NO: 2593 - DNA, 225 bp, Unknown
  bacterial strain Ascusb_1279 encodes 16S rRNA
agagtttgatcatggctcagaacgaacgctggtggcgtgtcttatacatgcaagtcgagcggcgtagcaatacgtagcggcgaacgggtgagtaacgcgtaagcaatctgccccatatcaggaaatacccgtgccaacgcgcggttaatgtccaggagagtggccccttgcatgaggggttgactagagattcatcggtatgggatgagcttgcgtccgattagc

SEQ ID NO: 2594 - DNA, 225 bp, Unknown
  bacterial strain Ascusb_3104 encodes 16S rRNA
agagtttgatcctggctcaggacgaacgctggcggcgtgcttaacacatgcaagtcgaacggggattaccgaacggaagggcttcggtccggaagattggtgattctagtggcggacgggtgagtaacgcgtgagcaacctgtcccagacagggggataacacttggaaacaggtgctaataccgcataagaccacggggagacatcttcctggggtaaaaggtg

SEQ ID NO: 2595 - DNA, 225 bp, Unknown
  bacterial strain Ascusb_403 encodes 16S rRNA
agagtttgatcatggctcaggacgaacgctggcggcatgcctaacacatgcaagtcgaacggagttaagagagcttgcttttttaacttagtggcggacgggtgagtaacgcgtgagtaacctgcctcttagtggggaataatgtactgaaaaggacactaataccgcataatgtatcgagatcgcatggttttgataccaaagatttatcgctgagagatggac

SEQ ID NO: 2596 - DNA, 225 bp, Unknown
  bacterial strain Ascusb_1620 encodes 16S rRNA
agagtttgatcatggctcaggacgaacgctggcggcgtgcctaacacatgcaagtcgaacgaagctccggatcggattcttcggatgaagagaaggaagacttagtggcggacgggtgagtaacgcgtgagcaacctgcctttcagagggggataacagttggaaacgactgctaataccgcataacataagatcatcgcatggtggttttatcaaagctgaggc

SEQ ID NO: 2597 - DNA, 225 bp, Unknown
  bacterial strain Ascusb_2247 encodes 16S rRNA
agagtttgatcatggctcaggatgaacgctagctacaggcttaacacatgcaagtcgaggggcatcgggaagttagcttgctaactttgccggcgaccggcgcacgggtgagtaacgcgtatccaaccttccccttagtagggcatagcccggcgaaagtcggattaataccctatgttattcgtcgaggacatctgaaatgaatcaaaggtttaccgctaaggg

SEQ ID NO: 2598 - DNA, 225 bp, Unknown
  bacterial strain Ascusb_5159 encodes 16S rRNA
agagtttgatcatggctcaggatgaacgctggcggcatgcctaagacatgcaagtcgaacgaagcggcccaatgaagaatgcgagcttgctcaaatttggatttggattcccgcttagtggcgcaagggtgagtaacacgtgggtaatctaccttcgagtttggaataacagttagaaatgactgctaatgccgaataatatggagaacgataattcatttttta

SEQ ID NO: 2599 - DNA, 225 bp, Unknown
  bacterial strain Ascusb_1203 encodes 16S rRNA
agagtttgatcatggctcagaacgaacgctggcggcaggtcttaggcatgcaagtcgaacggacgaagcggaagcttgcttccgcctagttagtggcgcacgagtgagtaacgcgtgggaaactgcccatcactggggaataacgtttggaaacgaacgctaataccgcatacgccggaaacgggaaagatttatcggtgatggatgtgcccgcgttggattagc

SEQ ID NO: 2600 - DNA, 225 bp, Unknown
  bacterial strain Ascusb_2894 encodes 16S rRNA
agagtttgatcctggctcaggatgaacgctggcggcgtgcttaacacatgcaagtcgaacggaacttagtcaatcgaagcagagggtgcttgcacccaaagcttcacccgattaagtttagtggcggacgggtgagtaacgcgtgagcaaccaaccttttgcagtgggacaacaattagaaatgattgctaataccgcataagaccacactaccgcatggtagag

SEQ ID NO: 2601 - DNA, 225 bp, Unknown
  bacterial strain Ascusb_1776 encodes 16S rRNA
agagtttgatcctggctcagaacgaacgctggcggcgcgtcttaagcatgcaagtcgagcggtaagtcgggagcttgctcctgacctagagcggcggactggtgagtaacgcgtgggtgacgtacctttgtgacggggacagctcctagaaataggagataataccggatacgctgcatgttgtcagaggacatgcaggaaaggatcttttgattcgcacagaga

SEQ ID NO: 2602 - DNA, 225 bp, Unknown
  bacterial strain Ascusb_949 encodes 16S rRNA
agagtttgatcctggctcaggatgaacgctggcggcgtgcctaatacatgcaagtcgagcgagaactttagaagcagcgaattatcaaagcagaaaaagggaaagcggcggacgggtgagtaacgcgtaggcaacctgcccttagcagagggatagccattggaaacgatgattaaaacctcataacgctgaactgacacatgtcggatcagccaaagatttatc

SEQ ID NO: 2603 - DNA, 225 bp, Unknown
  bacterial strain Ascusb_1372 encodes 16S rRNA
agagtttgatcatggctcaggataaacgctggcggcgcacataagacatgcaagtcgaacgaacttaattcattcttttagattgaaagcggttagtggcggactggtgagtacaacataagcaacctgcctataagaggggaacaacagttagaaatgactgctaataccgcatatgccataataatcacatgattatagtgggaaaggagcaatccgcttata

SEQ ID NO: 2604 - DNA, 225 bp, Unknown
  bacterial strain Ascusb_1924 encodes 16S rRNA
agagtttgatcatggctcaggattaacgctggcggcatgcctaatacatgcaagtcgaatggaagagcttgcttttccatggcgaacgggtgagtaacacgtaggtaacctaccttaaggacgaggataacctttggaaacgaaggataatactggataggacattataaagcacatgcttaaatgtttaaaggagcaatccaccataagaggggcctgcggcgc

SEQ ID NO: 2605 - DNA, 225 bp, Unknown
  bacterial strain Ascusb_3526 encodes 16S rRNA
agagtttgatcctggctcaggacgaacgctggcggcgtgcctaacacatgcaagtcgaacggacgaagggagcttgctccccgagttagtggcgaacgggtgagtaacgcgtgagcaacctgcctttcagagggggacaacggttggaaacgaccgctaataccgcatgaaacaatcggaccgcatgatctgattgtcaaagatttatcgctgaaagatgggctc

SEQ ID NO: 2606 - DNA, 225 bp, Unknown; identical to SEQ ID NO: 2308
  bacterial strain Ascusb_14159 encodes 16S rRNA

SEQ ID NO: 2607 - DNA, 225 bp, Unknown
  bacterial strain Ascusb_17284 encodes 16S rRNA
agagtttgatcatggctcaggatgaacgctggcggcgtgcttaacacatgcaagtcgaacggagtatcgacgctgaacgattgattagcttgctaagattgagttcttgttgatacttagtggcggacgggtgagtaacgcgtgggtaacctgccgtatgcagggggacaacagttggaaacgactgctaataccgcatatgcacacagtaaggcatcttacagg

SEQ ID NO: 2608 - DNA, 225 bp, Unknown
  bacterial strain Ascusb_4619 encodes 16S rRNA
agagtttgatcatggctcaggacgaacgctggcggcgtgcttaacacatgcaagtcgaacggggatatcggggatgagagcttcggcaggaatttctgatattcgagtggcggacgggtgagtaacgcgtgaacaatctgtcccagacagggggataacacttggaaacaggtgctaataccgcataagaccacagcttcgcatggagcaggggtaaaaggagca

SEQ ID NO: 2609 - DNA, 225 bp, Unknown
  bacterial strain Ascusb_2320 encodes 16S rRNA
agagtttgatcatggctcaggacgaacgctggcggcgtgcctaacacatgcaagtcgaacggaactgttttgaaagatttcttcggaatgattgattttcagtttagtggcggacgggtgagtaacgcgtgagtaacctgcctctgagaggggaataacgttttgaaaagaacgctaataccgcataacatttatctgtcgcatggcagataaatcaaagatttc

SEQ ID NO: 2610 - DNA, 225 bp, Unknown
  bacterial strain Ascusb_3244 encodes 16S rRNA
agagtttgatcctggctcaggacgaacgctggcggcgtgcttaacacatgcaagtcgaacggagttaagcgctgaattgatgctagcttgctagtggattttcttgcttaacttagtggcggacgggtgagtaacgcgtgagtaacctgcctctcagtggggaataacgccctgaaaagagcgctaataccgcataatatatttttgccgcatgacaggaatatc

SEQ ID NO: 2611 - DNA, 225 bp, Unknown
  bacterial strain Ascusb_1685 encodes 16S rRNA
agagtttgatcatggctcaggacgaacgctggcggcgcgcctaacacatgcaagtcgaacggacttcaggagcttgcttctgaagttagtggcggacgggtgagtaacacgtgagcaacctgcctttcagagggggacaacagttggaaacgactgctaataccgcataacgtggcttgggggcatccccgggctaccaaagatttatcgctgaaagatgggctc

SEQ ID NO: 2612 - DNA, 225 bp, Unknown
  bacterial strain Ascusb_1661 encodes 16S rRNA
agagtttgatcatggctcaggatgaacgctagctacaggcttaacacatgcaagtcgaggggcagcgagaagaaagcttgctttctttgtcggcgaccggcgcacgggtgagtaacgcgtatccaaccttccccttagtagggcatagcccggcgaaagtcggattaataccctatgttttccaatgaggacatctgagctggaataaagattgatcgctaaggg

SEQ ID NO: 2613 - DNA, 225 bp, Unknown
  bacterial strain Ascusb_7414 encodes 16S rRNA
agagtttgatcatggctcaggatgaacgctggcggcatgcctaagacatgcaagtcgaacgaggtggcccaatgaagatggagtgcttgcacaaagttggatttggattcccacctagtggcgcaagggtgagtaacacgtgggtaatctaccttcgagtctggaataacagttagaaatgattgctaatgccggataatatggaaaacgatacgtcattttgta

SEQ ID NO: 2614 - DNA, 225 bp, Unknown
  bacterial strain Ascusb_410 encodes 16S rRNA
agagtttgatcatggctcaggatgaacgctggcggcgtgcttaacacatgcaagtcgaacggagcttagaaggaagcttgctttcatttaagcttagtggcggacgggtgagtaacgcgtgagcaacctgccctcgagtggggaataacatcgagaaatcggtgctaataccgcataatgtcgagagaccgcatgatctttcgaccaaaggatttattcgcttga

SEQ ID NO: 2615 - DNA, 225 bp, Unknown
  bacterial strain Ascusb_2684 encodes 16S rRNA
agagtttgatcctggctcaggatgaacgctggcggcgtgcctaacacatgcaagtcgaacgaagcatatctgacggagattcgtcgaagttgggtatgacttagtggcggacgggtgagtaatgtatgagcaacctgcctttcagagggggacaacagttggaaacgactgctaataccgcataatgtatttgggtggcatcacctggataccaaaggagcaatc

SEQ ID NO: 2616 - DNA, 225 bp, Unknown
  bacterial strain Ascusb_6392 encodes 16S rRNA
agagtttgatcatggctcagaacgaacgctggcggcgcgtcttaagcatgcaagtcgagcgggagtatccagcttgctggatatgagagcggcggactggtgagtaacgcgtgggtgacgcacccttgggtcggggatagccttaagaaattaagggtaataccggatgaggtcctgcaggttggagatgcaggaggaaaggagccacggctccgcccgaggaac

SEQ ID NO: 2617 - DNA, 225 bp, Unknown
  bacterial strain Ascusb_2040 encodes 16S rRNA
agagtttgatcatggctcaggacgaacgctggcggcgtgcctaacacatgcaagtcgaacggagttacgggagcttgctcctgtaacttagtggcggacgggtgagtaacgcgtgagcaacctgccttacagagggggatagccattggaaacgatggataataccgcataacgtatggtcatggcatcttgatcataccaaaggagcaatccgctgtaagatgg

SEQ ID NO: 2618 - DNA, 225 bp, Unknown
  bacterial strain Ascusb_1992 encodes 16S rRNA
agagtttgatcatggctcaggatgaacgctggcggcgtgcctaacacatgcaagtcgaacgagcagagaggagcttgctcctcaaagctagtggcggacgggtgagtaacgcgtggataacctaccctgtacaggggaataacagttagaaatgactgctaatgccgcataagcgcacactgccgcatggcagagtgtgaaaagccgagacggtacaggatggat

SEQ ID NO: 2619 - DNA, 225 bp, Unknown
  bacterial strain Ascusb_3034 encodes 16S rRNA
agagtttgatcatggctcaggatgaacgctagctacaggcttaacacatgcaagtcgaggggcagcatgattctagcttgctagaattgatggcgaccggcgcacgggtgagtaacgcgtatccaaccttccccttagtagggcatagcccggcgaaagtcggattaataccctatgttcttcgttgaggacatctgaaatgaagcaaagatttatcgctaaggg

SEQ ID NO: 2620 - DNA, 225 bp, Unknown
  bacterial strain Ascusb_9232 encodes 16S rRNA
agagtttgatcctggctcaggatgaacgctggcggcgtgcctaacacatgcaagtcgaacggagtgttgagagtttacttttaacacttagtggcggacgggtgagtaatgcgtgagcaacctgcctttcagagggggacaacagttggaaacgactgctaataccgcataacatatacggatggcatcatctgtgtatcaaaggagcaatccgctgaaagatgg

SEQ ID NO: 2621 - DNA, 225 bp, Unknown
  bacterial strain Ascusb_3891 encodes 16S rRNA
agagtttgatcatggctcaggacgaacgctggcggcgtgcttaacacatgcaagtcgaacgaggtgatattgcggaaggcttcggccggaagcgatatgaccgagtggcggacgggtgagtaacgcgtgagcaacctgtcttacacagggggataacgctccgaaaggagtgctaataccgcataagaccacggtaccgcatgatactgaggtaaaaggagagat

SEQ ID NO: 2622 - DNA, 225 bp, Unknown
  bacterial strain Ascusb_1613 encodes 16S rRNA
agagtttgatcatggctcaggacgaacgctggcggcgtgcttaacacatgcaagtcgaacgaggatcatggagagcttgcttgaaatgatccgagtggcggacgggtgagtaacgcgtgagcaacctgtctcacacaggggaataacgcatcgaaagatgtgctaataccgcataggaccacggagtcgcatggctttgaggtgaaaggagcaatccggtgtgag

SEQ ID NO: 2623 - DNA, 225 bp, Unknown
  bacterial strain Ascusb_1496 encodes 16S rRNA
agagtttgatcatggctcaggatgaacgctggcggcgtgcttaacacatgcaagtcgaacggggtttattgaaagcttgctttttataaacctagtggcggacgggtgagtaacgcgtagggaacctgccccataccgggggacaacagttggaaacgactgctaataccgcatatgcttacgaagtcgcatgactttgtgaggaaaactccggtggtatgggat

SEQ ID NO: 2624 - DNA, 225 bp, Unknown
  bacterial strain Ascusb_3334 encodes 16S rRNA
agagtttgatcatggctcaggatgaacgctagctacaggcttaacacatgcaagtcgaggggcagcatgaagtttgcttgcaaactttgatggcgaccggcgcacgggtgagtaacgcgtatccaaccttccccttagtaggggatagcccggcgaaagtcggattaataccctatgttttccaatgcagacatctaaaatggaacaaaggtttaccgctaaggg

SEQ ID NO: 2625 - DNA, 225 bp, Unknown
  bacterial strain Ascusb_3778 encodes 16S rRNA
agagtttgatcatggctcagaacgaacgctggcggcgcgtcttaagcatgcaagtcgaacggcaagattggtgcttgcaccgatcctagagtggcggactggtgagtaacacgtgggtgacgtacccttttgttggggatagccggtagaaataccggataataccgaataatcttggcattttagaggatgttaaggaaaggagcttcggcttcgcagatggaa

SEQ ID NO: 2626 - DNA, 225 bp, Unknown
  bacterial strain Ascusb_2413 encodes 16S rRNA
agagtttgatcctggctcaggatgaacgctagctacaggcttaacacatgcaagtcgaggggcagcatggagtcagcttgctgactttgatggcgaccggcgcacgggtgcgtaacacgtatccaatctacccatggctcgggaatagcctttcgaaagaaagattaatgcccgatggccttacggagagacatctctctgtaagtaaagatttatcggcgatgg

SEQ ID NO: 2627 - DNA, 225 bp, Unknown
  bacterial strain Ascusb_845 encodes 16S rRNA
agagtttgatcatggctcaggatgaacgctagcggcaggcttaacacatgcaagtcgaggggcagcgagggtagcaatacctgtcggcgaccggcggaagggtgcgtaacgcgtgagcaacatgcccgcggccgggggataagcattggaaacgatgtctaataccccatacgatgcgaggaggcatctccttgttttgaaagatttatcggcagcggattggtt

SEQ ID NO: 2628 - DNA, 225 bp, Unknown
  bacterial strain Ascusb_2495 encodes 16S rRNA
agagtttgatcatggctcaggatgaacgctggcggcgtgcctaatacatgcaagtcgagcgagggtagcaatacccgagcggcgaacgggtgagtaacacgtaggtaacctgcctttgagactgggatacccggacgaaagttcggctaataccggataacaacggggacggcatcgtctccgcttgaaaggtgcgtttgcaccactcttagatggacctgcggc

SEQ ID NO: 2629 - DNA, 225 bp, Unknown
  bacterial strain Ascusb_9898 encodes 16S rRNA
agagtttgatcctggctcaggatgaacgctagcgacaggcctaacacatgcaagtcgaggggcagcgcggaagtagcttgctatttctggcggcgaccggcgcacgggtgcgtaacaggtgtgcaatctgtccatagtcggggaatagcccagcgaaagttggattaaagctccatgtgtcacgaagccgcatgactttgtgatgaaacgtaaggactatgggtg

SEQ ID NO: 2630 - DNA, 225 bp, Unknown
  bacterial strain Ascusb_1945 encodes 16S rRNA
agagtttgatcatggctcaggatgaacgctagctacaggcttaacacatgcaagtcgaggggcagcaggacgatagcttgctattgttgctggcgaccggcgcacgggtgagtaacgcgtatccaaccttccccttagtagggcatagcccggtgaaaatcggattaataccctatgttgtgtcatgaggacatctgaataacactaaagatttatcgctaaggg

SEQ ID NO: 2631 - DNA, 225 bp, Unknown
  bacterial strain Ascusb_832 encodes 16S rRNA
agagtttgatcatggctcaggattaacgctagcggtatgcctaatacatgcaagtcgagcgggagcagcaatgctctagcggcaaacgggtgagtaatacgtatctaatctgccctttagaaaggaacaacagatcgaaagatttgctaataccttataggacattaactcgcatgagataatgtttaaagttccgttcggaacgctttaggatgagggtgcggc

SEQ ID NO: 2632 - DNA, 225 bp, Unknown
  bacterial strain Ascusb_3259 encodes 16S rRNA
agagtttgatcatggctcaggatgaacgctggcggcgtgcttaacacatgcaagtcgaacgaagcatttgtacctgatcttttcggagtgaagggacttatgacttagtggcggacgggtgagtaacgcgtgggcaacctgccgtatgcagggggacaacagttggaaacgactgctaataccgcataagcgcacactgtcacatggcagagtgtgaaaagaatt

SEQ ID NO: 2633 - DNA, 225 bp, Unknown
  bacterial strain Ascusb_4836 encodes 16S rRNA
agagtttgatcctggctcaggatgaacgctggcggcgtgcctaatacatgcaagtcgaacgggtgcagcaatgtactagtggcgaacgggtgagtaacacgttggtgacctgccccaaagatgggaatatcacctggaaacgggtggcaaaaccgaataagcttatcttagttagagaaggataagtaaaagtgcaaactactttgggaggggcctgcggcccat

SEQ ID NO: 2634 - DNA, 225 bp, Unknown
  bacterial strain Ascusb_7156 encodes 16S rRNA
agagtttgatcatggctcaggatgaacgctagcgacaggcctaacacatgcaagtcgaggggcagcgcggaaatagtttactagttctggcggcgaccggcgcacgggtgcgtaacaggtgtgcaatctgtccatagtcggggaatagcccaccgaaaggtgaattaatgctccatgtgagtagaagccgcatgacttttacttaaaacgtaaggactatgggtg

SEQ ID NO: 2635 - DNA, 225 bp, Unknown
  bacterial strain Ascusb_246 encodes 16S rRNA
agagtttgatcctggctcaggacgaacgctggcggcacgcctaacacatgcaagtcgaacggagatttgagagcttgctcttaaatcttagtggcggacgggtgagtaacacgtgagcaacctgcctctgagagagggatagcttctggaaacggatggtaatacctcataacatagctggaccgcatgatccggttatcaaagatttatcactcagagatgggc

SEQ ID NO: 2636 - DNA, 225 bp, Unknown
  bacterial strain Ascusb_2896 encodes 16S rRNA
agagtttgatcatggctcaggatgaacgctggcggcgtgcttaacacatgcaagtcgagcgagaagctcgtgaacgattcttcggatgagtgatcgagtggaaagcggcggacgggtgagtaacgcgtaggcaacctgccccatacaaagggatagctactggaaacggtaattaatacctcataacacgagaggatcgcatgttcttctcgtcaaagatttatc

SEQ ID NO: 2637 - DNA, 225 bp, Unknown
  bacterial strain Ascusb_17947 encodes 16S rRNA
agagtttgatcatggctcaggatgaacgctagctacaggcttaacacatgcaagtcgaggggtaacgacagcgaaagcttgcttttgctgggcgacgaccggcgcacgggtgagtaacgcgtatccaacctgcccataactaagggataatccgtagaaatgcggtctaataccttatgtgttccgaagaagacatctgaattggaataaagatttatcggttat

SEQ ID NO: 2638 - DNA, 225 bp, Unknown
  bacterial strain Ascusb_554 encodes 16S rRNA
agagtttgatcatggctcaggatgaacgctggcggcgtgcttaacacatgcaagtcgaacggagtttacatgaaacctagtgattgtaaacttagtggcggacgggtgagtaacgcgtgggtaacctgccttataccgggggacaacagttagaaatgactgctaataccgcataagcgcacggtgtcgcatgacacagtgtgaaaaactccggtggtataagat

SEQ ID NO: 2639 - DNA, 225 bp, Unknown
  bacterial strain Ascusb_1038 encodes 16S rRNA
agagtttgatcatggctcaggacgaacgctggcggcatgcctaacacatgcaagtcgaacggagttaagagagcttgcttttttaacttagtggcggacgggtgagtaacgcgtgagtaacctgcctcttagtggggaataatgtactgaaaaggacactaataccgcatgatgtacagagatcgcatggtctttgtaccaaagatttatcgctgagagatggac

SEQ ID NO: 2640 - DNA, 225 bp, Unknown
  bacterial strain Ascusb_5866 encodes 16S rRNA
agagtttgatcatggctcagaacgaacgctggcggcaggcctaacacatgcaagtcgagcgtgaaaggggcttcggccctgagtaaagcggcgcacgggtgagtaacacgtgaataatctgccctttggaccgggataacagaccgaaaggactgctaataccggataagcttccgcgccaaccgggcgagtggagaaaaggatgggtctttcgggaccattcac

SEQ ID NO: 2641 - DNA, 225 bp, Unknown
  bacterial strain Ascusb_17576 encodes 16S rRNA
agagtttgatcctggctcaggatgaacgctagctacaggcttaacacatgcaagtcgaggggaaacgattagaggtgcttgcaccactaaggcgtcgaccggcgcacgggtgagtaacgcgtatccaacctgccccacggtaaggaataatccgtagaaatgcggtctaataccttatgtgctccgacgaggacatctgatttggagtaaagatttctcgccatg

SEQ ID NO: 2642 - DNA, 225 bp, Unknown
  bacterial strain Ascusb_933 encodes 16S rRNA
agagtttgatcctggctcaggatgaacgctggcggcgtgcctaacacatgcaagtcgaacggtgatgatttgatattttcggatggattttcatcatagtggcggacgggtgagtaacgcgtggataacctgcctcgtactggggaatagcagctggaaacggctggtaataccgcataagcgcacggacccgcatgagtctgtgtgaaaagatttatcggtacg

SEQ ID NO: 2643 - DNA, 225 bp, Unknown
  bacterial strain Ascusb_1660 encodes 16S rRNA
agagtttgatcatggctcaggatgaacgctggcggcgtgcttaacacatgcaagtcgaacggagtttattgagaagcttgctttttggtaaacttagtggcggacgggtgagtaacgcgtgggtaacctgccttataccgggggataacgtttggaaacgaacgctaataccgcataagcgcacgggctcgcatgagtctgtgtgaaaaactccggtggtataag

SEQ ID NO: 2644 - DNA, 225 bp, Unknown
  bacterial strain Ascusb_11992 encodes 16S rRNA
agagtttgatcatggctcaggatgaacgctagctacaggcttaacacatgcaagtcgaacgaagttaaagagcttgctttttaacttagtggcggacgggtgagtaacgcgtgagcaacctgcctttcagtggggaataatacttcgaaaggagtactaataccgcataacgtatgacggtcgcatgactgacataccaaagatttatcgctgagagatgggctc

SEQ ID NO: 2645 - DNA, 225 bp, Unknown
  bacterial strain Ascusb_6349 encodes 16S rRNA
agagtttgatcctggctcaggatgaacgctggcggcgtgcttaacacatgcaagtcgaacgaagcactggtcttgaagttttcggacggaaagacctttgacttagtggcggacgggtgagtaacgcgtgggcaacctgccgtatgcagggggacaacagttggaaacgactgctaataccgcataagcgcacggggacgcatgttcctgtgtgaaaagccttaa

SEQ ID NO: 2646 - DNA, 225 bp, Unknown
  bacterial strain Ascusb_593 encodes 16S rRNA
agagtttgatcatggctcaggatgaacgctggcggcatgcctaacacatgcaagtcgaacggagttggaggtagcttgctactgacaacttagtggcggacgggtgagtaacgcgtgagtaacctgcctctaagagggggataacgttctgaaaagaacgctaataccgcatataattacgaagtcgcatgattttgtgatgaaaggagcaatccgcttagagat

SEQ ID NO: 2647 - DNA, 225 bp, Unknown
  bacterial strain Ascusb_9441 encodes 16S rRNA
agagtttgatcatggctcaggatgaacgctagcgacaggcttaacacatgcaagtcgaggggcatcgcgggggtggcaacactcctggcggcgaccggcgcactggtgagtaacacgtatgcaacctgcccccggcagagggataaacccgggaaactgggcctaatacctcatgcgccgcgatcccgcatgggtttgcggtgaaaggattccggccggggatgg

SEQ ID NO: 2648 - DNA, 225 bp, Unknown
  bacterial strain Ascusb_3101 encodes 16S rRNA
agagtttgatcctggctcaggatgaacgctagctacaggcttaacacatgcaagtcgagcggaacactttcgggtgtttagcggcagacgggtgagtaacacgtatccaacctttcccttacccgggtatagcctcgggaaactgagagtaatccccgatgtggtgcacgagaagcattttttgcgcacgaaagattcatcggtaaggggtggggatgcgttcca

SEQ ID NO: 2649 - DNA, 225 bp, Unknown
  bacterial strain Ascusb_771 encodes 16S rRNA
agagtttgatcatggctcaggacgaacgctggcggcgtgcctaacacatgcaagtcgaacggagcgaaagcagcttgctgctggagcttagtggcggacgggtgagtaacacgtgagtaacctgcctttcagaggggaataatgtctggaaacggacactaataccgcataacatatattaaccgcatgattgatatatcaaaggagcaatccgctgaaagatgg

SEQ ID NO: 2650 - DNA, 225 bp, Unknown
  bacterial strain Ascusb_2003 encodes 16S rRNA
agagtttgatcctggctcaggacgaacgctggcggcgtgcttaacacatgcaagtcgaacgaagtcgttccaccgacacggattacttcggtaagaagtgtcaccggaaaggcttagtggcggacgggtgagtaacgcgtgagcaacctgcccataagagggggataacagttggaaacgactgctaataccgcataagaccacattaccgcatggtagaggggt

SEQ ID NO: 2651 - DNA, 225 bp, Unknown
  bacterial strain Ascusb_2601 encodes 16S rRNA
agagtttgatcatggctcaggataaacgctggcggcgcacataagacatgcaagtcgaacgaacttaatcttaatatttatattgagaagcggttagtggcggactggtgagtaacgcgtaagcaatctacctattagaggggaataacagtgagaaatcattgctaataccgcatatgccataagaaccacatggttccagtgggaaaggagcaatccgctaat

SEQ ID NO: 2652 - DNA, 225 bp, Unknown
  bacterial strain Ascusb_4699 encodes 16S rRNA
agagtttgatcctggctcaggacgaacgctggcggcgcgcttaacacatgcaagtcgaacggacgaccccggaacagagattcgttgacgggaaggggaagttagtggcgaacgggtgagtaacacgtgaagaacctgcctcagagagggggataacacttagaaataggtgctaataccgcatatgaccacactaccgcatggtagagaggtgaaaggagcaat

SEQ ID NO: 2653 - DNA, 225 bp, Unknown
  bacterial strain Ascusb_869 encodes 16S rRNA
agagtttgatcatggctcaggatgaacgctggcggcgtgcctaacacatgcaagtcgagcggagatacatgtctaagagatttcggtcgaattaattgtatcttagcggcggatgggtgaggaacgcgtggagaacctgcccttcacagggggataacagctggaaacggctgttaataccgcatatgctcacaggatcgcatgatccagggaggaaagccgaga

SEQ ID NO: 2654 - DNA, 225 bp, Unknown
  bacterial strain Ascusb_10944 encodes 16S rRNA
agagtttgatcatggctcaggatgaacgctagctacaggcttaacacatgcaagtcgaggggcagcatgaacttagcttgctaagtttgatggcgaccggcgcacgggtgagtaacgcgtatccaaccttccccatagtaggggatagcccggcgaaagtcggattaataccctatgttcttcgtcgaggacatctgaagtgaagcaaaggtttaccgctatggg

SEQ ID NO: 2655 - DNA, 225 bp, Unknown
  bacterial strain Ascusb_3301 encodes 16S rRNA
agagtttgatcatggctcaggacgaacgctggcggcgtgcctaacacatgcaagtcgaacggagatgcattggcggagacttcggtcaacaacgatgtattcttagtggcggacgggtgagtaacgcgtgagcaatttgcctttcagagggggataacagattgaaaagtctgctaataccgcataacgtgcgacgggggcatccccgatgcaccaaaggagcaa

SEQ ID NO: 2656 - DNA, 225 bp, Unknown
  bacterial strain Ascusb_5898 encodes 16S rRNA
agagtttgatcatggctcagaacgaacgctggcggcgcgtcttaagcatgcaagtcgagcggtaagtcgggagcttgctcctgacctagagcggcggactggtgagtaacgcgtgggtgacgtacctttgtgatggggacagctcctagaaataggagataataccgaatacgctgtatgttgtcagaggatatacaggaaaggatcttttgattcgcacagaga

SEQ ID NO: 2657 - DNA, 225 bp, Unknown
  bacterial strain Ascusb_1594 encodes 16S rRNA
agagtttgatcatggctcaggatgaatgctggcggcgtgcctaatacatgcaagtcgagcggtaacagaggtagcttgctacctgctgacgagcggcggacggctgagtaacgcgtgggaacggaccccaaactgagggataactactcgaaagagtggctaataccgcatgtgatcttcggattaaagcttcggcggtttgggactggcctgcgtacgattaga

SEQ ID NO: 2658 - DNA, 225 bp, Unknown
  bacterial strain Ascusb_3421 encodes 16S rRNA
agagtttgatcctggctcaggatgaacgctggcggcgtgcctaacacatgcaagtcgagcggagccacagggtgatccttcgggtgatccctatgacttagcggcggatgggtgagtaacacgtgggtaatctgccctgcactgggggataacagttggaaacgactgttaataccgcatatgcacacgtggccgcatggccgtgggtggaaagattcatcggtg

SEQ ID NO: 2659 - DNA, 225 bp, Unknown
  bacterial strain Ascusb_465 encodes 16S rRNA
agagtttgatcatggctcaggacgaacgctggcggcgtgcctaacacatgcaagtcgaacgaagcattttcctcggagattcgtcgaagagggacttgacttagtggcggacgggtgagtaatgcgtgagcaacctgcccttcagagggggacaacagttggaaacgactgctaataccgcatgatgtcatcgggaggcatcttctgatgaccaaagatttatcg

SEQ ID NO: 2660 - DNA, 225 bp, Unknown
  bacterial strain Ascusb_4463 encodes 16S rRNA
agagtttgatcatggctcaggatgaacgctagcgacaggcctaacacatgcaagtcgaggggcagcgcgagaatagtttactagtcttggcggcgaccggcgcacgggtgcgtaacaggtgtgcaatctgtccatagtcgggggatagcccagcgaaagctgaattaaaactccatgtgaatcgaagccgcatgactttgatttgaaacgcaaggactatgggtg

SEQ ID NO: 2661 - DNA, 225 bp, Unknown
  bacterial strain Ascusb_5653 encodes 16S rRNA
agagtttgatcatggctcaggacgaacgctggcggcgtgcttaacacatgcaagtcgaacgaggatacatcagatgagagcttcggcaggaatcaggtgtattcgagtggcggacgggtgagtaacgcgtgagcaacctgtcccagacaggggaataacacttggaaacaggtgctaataccgcataagaccacggggccacatggccttggggtaaaaggagca

SEQ ID NO: 2662 - DNA, 225 bp, Unknown
  bacterial strain Ascusb_16694 encodes 16S rRNA
agagtttgatcctggctcagaacgaacgctggcggcgcgtcttaagcatgcaagtcgagcgggagtacctagcttgctaggtatgagagcggcggactggtgagtaacgcgtgggtgacgtactctccggacggggatagctcctagaaataggagataataccggatacggtgtcatgtgtcagaggcatgacaggaaagcagcctttgctgcgccggaggagc

SEQ ID NO: 2663 - DNA, 225 bp, Unknown
  bacterial strain Ascusb_3158 encodes 16S rRNA
agagtttgatcatggctcaggatgaacgctggcggcgtgcctaatacatgcaagtcgatcgagggagacacagcttgctgagtcgaactagaggcgaacgggtgagtaatacataagcaacctgcccacgaagactgggataatccctggaaacggggactaagaccggataggtaacgggaccgcatggtcttgttattaaaggacaaaaacactggtggatgg

SEQ ID NO: 2664 - DNA, 225 bp, Unknown
  bacterial strain Ascusb_6751 encodes 16S rRNA
agagtttgatcatggctcagaacgaacgctggcggcgcgtcttaagcatgcaagtcgagcggtaagattggtgcttgcactaatcctagagcggcggactggtgagtaacgcgtgggtgacgtacctttgtgacggggacagctcctagaaataggagataataccggatacgctgcatgttgtcagaggacatgcaggaaaggatcttttgattcgcacagaga

SEQ ID NO: 2665 - DNA, 225 bp, Unknown
  bacterial strain Ascusb_3055 encodes 16S rRNA
agagtttgatcatggctcaggatgaacgctggcggcgtgcataacacattcaagtcgaacgaagcgtgcggaacgagaccttcgggtcaagagaagtacgacttagtggcggacgggtgagtaacgcgtgagcaaccttcctgcttgtgagggataacacagggaaacttgtgctaataccgcatgacgcataactgtcgcatggtggatatgccaaagatatat

SEQ ID NO: 2666 - DNA, 225 bp, Unknown
  bacterial strain Ascusb_13090 encodes 16S rRNA
agagtttgatcctggctcaggatgaacgctggcggcatgcctaagacatgcaagtcgaacgagacggcccattgaagattgagtgcttgcacgatttcggatttggattcccgtctagtggcgcaagggtgagtaatacgtgggtaatctaccttcgagtttggaataacagttagaaatgattgctaatgccgaattatatattttaagatacgtcttttaata

SEQ ID NO: 2667 - DNA, 225 bp, Unknown
  bacterial strain Ascusb_4047 encodes 16S rRNA
agagtttgatcatggctcaggatgaacgctggcggcgtgcttaacacatgcaagtcgaacgaagctccatttaagatttcttcggaatgattttgtggatgacttagtggcggacgggtgagtaacgcgtgaggaacctgccttgcagaggggaataacagttggaaacgactgctaataccgcataatacgaaggagtcgcatgattttttcgtcaaagattta

SEQ ID NO: 2668 - DNA, 225 bp, Unknown
  bacterial strain Ascusb_2140 encodes 16S rRNA
agagtttgatcatggctcaggatgaacgctagctacaggcttaacacatgcaagtcgaggggcagcatgggagtagcttgctactcttgatggcgaccggcgcacgggtgcgtaacacgtatccaatctacccatggctcgggaatagcctttcgaaagaaagattaatgcccgatggtctgtcagtgagacatctcgcaggcagtaaagattaatcggcgatgg

SEQ ID NO: 2669 - DNA, 225 bp, Unknown
  bacterial strain Ascusb_2244 encodes 16S rRNA
agagtttgatcatggctcaggatgaacgctagcggcaggcctaacacatgcaagtcgaggggcagcggggtgtagcaatacactgccggcgaccggcgcacgggtgcgtaacgcgtatgcaacctgcccgcgacagggggataacgctgggaaaccggcactaataccccgtaacacccgggtccgcatggatctgggttgaaaggagcgatccggtcgcggatg

SEQ ID NO: 2670 - DNA, 225 bp, Unknown
  bacterial strain Ascusb_1119 encodes 16S rRNA
agagtttgatcatggctcagaacgaacgctggcggcaggtcttaggcatgcaagtcgaacgagcgaagcagggcttgccctgtggaacgagtggcgcacgagtgagtaacgcgtgggaaactgcccaccactggggaataacgtctggaaacggacgctaataccgcatacgccggaaacgggaaagatttatcggtggtggatgtgcccgcgttggattagctt

SEQ ID NO: 2671 - DNA, 225 bp, Unknown
  bacterial strain Ascusb_4974 encodes 16S rRNA
agagtttgatcatggctcaggataaacgctggcggcgtgcttaacacatgcaagtcgaacggagtatctctcccgagactaaggaagcttgcttccgaggaatcatttgagatacttagtggcggacgggtgagtaacgcgtgggaaacctgccctatgcagggggataacagttggaaacgactgttaataccgcataagcgcacagtaccgcatggtacagtg

SEQ ID NO: 2672 - DNA, 225 bp, Unknown
  bacterial strain Ascusb_2541 encodes 16S rRNA
agagtttgatcatggctcaggatgaacgctggcggcgtgcctaatacatgcaagtcgaacgagatgtagcaatacatctagtggcgaacgggtgagtaacacgtattcaatctgccctaacgactgggataccctcgggaaaccttggctaataccggataggaaatcgaatcgcatgatttgatttttaaaggatcttttgattcacgataggatgagaatgcg

SEQ ID NO: 2673 - DNA, 225 bp, Unknown
  bacterial strain Ascusb_1324 encodes 16S rRNA
agagtttgatcatggctcaggatgaacgctagctacaggcttaacacatgcaagtcgaggggcagcatggtcttagcttgctaaggctgatggcgaccggcgcacgggtgagtaacgcgtatccaaccttccccttagtagggcatagcccggcgaaagtcggattaataccctatgttgtcaatagaggacatctgaagctgaccaaaggtttaccgctaaggg

SEQ ID NO: 2674 - DNA, 225 bp, Unknown
  bacterial strain Ascusb_12678 encodes 16S rRNA
agagtttgatcctggctcaggatgaacgctggcggcgtgcctaacacatgcaagtcgaacgaagcgcctcgcccgacgaagtggagtgcttgcacaaagcggaatcaattgaggcgacttagtggcggacgggtgagtaacgcgtgggtaacctgccttatacagggggataacagttagaaatgactgctaataccgcataagcgcacagtatcgcatgatacg

SEQ ID NO: 2675 - DNA, 225 bp, Unknown
  bacterial strain Ascusb_4037 encodes 16S rRNA
agagtttgatcctggctcaggatgaacgctggcggcgtgcttaacacatgcaagtcgagcgaagcactgtttctgaagttttcggatggacgagactttgactgagcggcggacgggtgagtaacgcgtggggaacctgccccataccgggggataacagatggaaacgtctgctaataccgcataagcgcacgaagcggcatcgttttgtgtgaaaaactccgg

SEQ ID NO: 2676 - DNA, 225 bp, Unknown
  bacterial strain Ascusb_2025 encodes 16S rRNA
agagtttgatcatggctcaggatgaacgctagctacaggcttaacacatgcaagtcgaggggcagcatgaggtttgcttgcaaaccttgatggcgaccggcgcacgggtgcgtaacgcgtatccaaccttccagctactagggaatagcccgttgaaagacggattaatgccctatgtgttcattagatggcatcagatgttgaacaaagattcatcggtagctg

SEQ ID NO: 2677 - DNA, 225 bp, Unknown
  bacterial strain Ascusb_11080 encodes 16S rRNA
agagtttgatcctggctcaggatgaacgctggcggcatgcctaagacatgcaagtcgaacgaggtggcccactgactaatattgaaaatggagtgcttgcacaaagttggatttattatgatgtggatcttccacctagtggcaaacgggtgagtaacacatgggttacctgcctctaagttggggataacagttggaaacgattgctaataccgaatgtgatct

SEQ ID NO: 2678 - DNA, 225 bp, Unknown
  bacterial strain Ascusb_2329 encodes 16S rRNA
agagtttgatcctggctcaggatgaacgctggcggcgtgcttaacacatgcaagtcgaacgaagcatttaacctgatttcttcggattgaaggttttatgacttagtggcggacgggtgagtaacgcgtggggaacctgccccataccgggggacaacagttggaaacggctgctaataccgcataagcgcacgggatggcatcatccagtgtgaaaaactccgg

SEQ ID NO: 2679 - DNA, 225 bp, Unknown
  bacterial strain Ascusb_1989 encodes 16S rRNA
agagtttgatcctggctcaggatgaacgctagctacaggcttaacacatgcaagtcgaggggcagcattgggatagcttgctattccagatggcgaccggcgcacgggtgagtaacgcgtatccaaccttccccatagtagggcacagcccggcgaaagtcggattaattccctatgctgtccagagaggacatctgacctggacgaaagattcatcgctatggg

SEQ ID NO: 2680 - DNA, 225 bp, Unknown
  bacterial strain Ascusb_8451 encodes 16S rRNA
agagtttgatcatggctcaggatgaacgctagctacaggcttaacacatgcaagtcgaggggcagcatgacgattgcttgcaattgttgatggcgaccggcgcacgggtgagtaacgcgtatccaaccttccgcatagtagggaatagcccggcgaaagtcggattaatgccctatgttttccaatgaggacatctgagctggaacaaagatttatcgctatgcg

SEQ ID NO: 2681 - DNA, 225 bp, Unknown
  bacterial strain Ascusb_1095 encodes 16S rRNA
agagtttgatcatggctcaggatgaacgctggcggcgtgcttaacacatgcaagtcgaacggactgcacggactgaaattttcggatggatgaccgtgtacgttagtggcggacgggtgagtaacgcgtgggaaacctgccctattccgggggataccagttggaaacgactgttaataccgcataagcgcacattgccgcatggcagagtgtgaaaaactccgg

SEQ ID NO: 2682 - DNA, 225 bp, Unknown
  bacterial strain Ascusb_1565 encodes 16S rRNA
agagtttgatcatggctcaggatgaacgctggcggcgtgcttaacacatgcaagtcgaacgaagcattgaggaggaagttttcggacggaattcgctttgacttagtggcggacgggtgagtaacgcgtgggtaacctgccgtatgcagggggacaacagctggaaacggctgctaataccgcataagcgcacagcatcgcatggtgcagtgtgaaaagatttat

SEQ ID NO: 2683 - DNA, 225 bp, Unknown
  bacterial strain Ascusb_8178 encodes 16S rRNA
agagtttgatcctggctcaggatgaacgctggcggcatgcctaagacatgcaagtcgaacgaggtgccccattgaagattgcgtgcttgcacaaaattggatttggatcagcacctagtggcggacgggtgagtaacacgtgggtgacctaccttcaagactgggatacctattggaaacgatagttaataccggataacacattaattcgttttaatgttgaaa

SEQ ID NO: 2684 - DNA, 225 bp, Unknown
  bacterial strain Ascusb_724 encodes 16S rRNA
agagtttgatcctggctcaggatgaacgctagctacaggcttaacacatgcaagtcgaggggcagcatgagattagcttgctaatcttgatggcgaccggcgcacgggtgagtaacgcgtatccaaccttccccctactcaggcatagcccggtgaaaaccggattaactcctgatagtttcactagatggcatctgacggtgaataaagctcagcggtaaggga

SEQ ID NO: 2685 - DNA, 225 bp, Unknown
  bacterial strain Ascusb_4988 encodes 16S rRNA
agagtttgatcatggctcaggatgaacgctggcggcgtgcttaacacatgcaagtcgaacggagtattgacgctgaggagtggagagcttgctcaaagcaaatcttgtcgatacttagtggcggacgggtgagtaacgcgtgggtaacctgccgtatgcagggggacaacagttggaaacgactgctaataccgcatatgcacacagtaaggcatcttacagggt

SEQ ID NO: 2686 - DNA, 225 bp, Unknown
  bacterial strain Ascusb_555 encodes 16S rRNA
agagtttgatcatggctcaggataaacgctggcggcgtgcctaatacatgcaagtcgaacggagagagacaagcttgcttgtcgaacttagtggcgaacgggtgagtaatacataagcaacctgcccataaagtccgggataactttgggaaactggaattaataccggataggtaacttggacgcatgttcgggttattaaaggtgagaaacgctaatggatgg

SEQ ID NO: 2687 - DNA, 225 bp, Unknown
  bacterial strain Ascusb_4607 encodes 16S rRNA
agagtttgatcctggctcaggacgaacgctggcggcgtgcttaacacatgcaagtcgagcggggataacggaactgaaagcttcggccggatgatctgttattccagcggcggacgggtgagtaacgcgtgagcaatctgtcccagacagggggataacacttggaaacaggtgctaataccgcataagaccacgtcctcacatggggatgaggtaaaaggagcg

SEQ ID NO: 2688 - DNA, 225 bp, Unknown
  bacterial strain Ascusb_443 encodes 16S rRNA
agagtttgatcatggctcaggacgaacgctggcggcgtgcctaacacatgcaagtcgaacggacgaggggagcttgctccccaagttagtggcggacgggtgagtaacacgtgagcaacctgcccttcggagggggacaacagcgggaaactgctgctaataccgcataacgtatttttgaggcatctcgggaataccaaagattttatcgccgaaggatgggct

SEQ ID NO: 2689 - DNA, 225 bp, Unknown
  bacterial strain Ascusb_2222 encodes 16S rRNA
agagtttgatcatggctcaggacgaacgctggcggcgtgcttaacacatgcaagtcgagcggactcttattgaaagcttgctggatataagagttagcggcggacgggtgagtaacgcgtgagcaacctgtcctctacagggggataagatcccgaaagggattctaataccgcatgagaccacagaaggacatccttcaggggtcaaaggagcaatccggtaga

SEQ ID NO: 2690 - DNA, 225 bp, Unknown
  bacterial strain Ascusb_4598 encodes 16S rRNA
agagtttgatcatggctcaggatgaatgctggcggcgtgcctaatacatgcaagtcgagcggtaacagggcttcaccgtgttcttgacgcacttggccatagagcaagtagctgaattcgagagcacagtgaagctgctgacgagcggcggacggctgagtaacgcgtgggaacggaccccaaactgagggataacgcaccgaaaggtgtgctaataccgcatgt

SEQ ID NO: 2691 - DNA, 225 bp, Unknown
  bacterial strain Ascusb_3385 encodes 16S rRNA
agagtttgatcatggctcaggatgaacgctagcggcaggcttaacacatgcaagtcgaggggcagcgtggagtagcaatactctgacggcgaccggcgaaagggtgagtaacgcgtgagcaacatgcccggtagtggaggatagtcgatggaaacgtcgtgtaatactccgtaacaacattgaccgcatgatcgatgtttaatagatttattgctatcggattgg

SEQ ID NO: 2692 - DNA, 225 bp, Unknown
  bacterial strain Ascusb_4965 encodes 16S rRNA
agagtttgatcctggctcaggatgaacgctggcggcgtgcctaacacatgcaagtcgaacggagatcttacagatggaggcttcggtcaaaagaagtttgatcttagtggcggacgggtgagtaacgcgtggagaacctgccctgtacagggggataacaggcagaaatgcctgctaataccgcataagcgcacgggagcgcatgctccagtgtgaaaaactccg

SEQ ID NO: 2693 - DNA, 225 bp, Unknown
  bacterial strain Ascusb_495 encodes 16S rRNA
agagtttgatcatggctcaggacgaacgctggcggcatgcctaacacatgcaagtcgaacggaagtaagagaagcttgcttttcttactttagtggcggacgggtgagtaacgcgtgagcaatctgcctttcagtggggaataatgttctgaaaagagcactaataccgcataaagtatcgttgccgcatgacgatggtaccaaagatttatcgctgagagatga

SEQ ID NO: 2694 - DNA, 225 bp, Unknown
  bacterial strain Ascusb_2402 encodes 16S rRNA
agagtttgatcatggctcaggatgaacgctggcggcgtgcctaacacatgcaagtcgaacgaagcataactgacggagattcgtcgaagccggttatgacttagtggcggacgggtgagtaatgtatgagcaacctgcctttcagagggggacaacagttggaaacgactgctaataccgcataatgtacggaggggacatccccactgtaccaaaggagcaatc

SEQ ID NO: 2695 - DNA, 225 bp, Unknown
  bacterial strain Ascusb_1583 encodes 16S rRNA
agagtttgatcatggctcaggatgaacgctagctacaggcttaacacatgcaagtcgaggggcagcgaggagttagcttgctaactctgtcggcgaccggcgcacgggtgagtaacgcgtatccaaccttccccgtactagaggatagcccggcgaaagtcggattaatactctatgttgtattatgaggacatctgagtaataccaaaggtttaccggtatggg

SEQ ID NO: 2696 - DNA, 225 bp, Unknown
  bacterial strain Ascusb_1941 encodes 16S rRNA
agagtttgatcctggctcaggacgaacgctggcggcgtgcttaacacatgcaagtcgagcggagacatacgaacggaaggcttcggccggaagattgtatgttttagcggcggacgggtgagtaacgcgtgaacaatctgtccttcacagggggataagacagcgaaagttgttctaataccgcatgggaccacggcccggcatcgggcaggggtgaaaggagca

SEQ ID NO: 2697 - DNA, 225 bp, Unknown
  bacterial strain Ascusb_994 encodes 16S rRNA
agagtttgatcatggctcaggatgaacgctggcggcgtgcttaacacatgcaagtcgaacggagcttatttggaaagcttgcttttcgtttaagcttagtggcggacgggtgagtaacgcgtgagcaacctgcccttcagtggggaataacaccgagaaatcggtgctaataccgcataatgtcggaggaccgcatgatccaccgaccaaaggatttattcgctg

SEQ ID NO: 2698 - DNA, 225 bp, Unknown
  bacterial strain Ascusb_3181 encodes 16S rRNA
agagtttgatcatggctcaggacgaacgctggcggcgtgcctaacacatgcaagtcgaacggagttaagcgctgaatgaagcttcggcagaattcttgcttaacttagtggcggacgggtgagtaacgcgtgagtaacctgcctctgagaggggaataacgttctgaaaagatcgctaataccgcataacatatcgaagtcgcatggctttggtatcaaagattt

SEQ ID NO: 2699 - DNA, 225 bp, Unknown
  bacterial strain Ascusb_2547 encodes 16S rRNA
agagtttgatcatggctcaggacgaacgctggcggcgtgcttaacacatgcaagtcgagcggacttgtgaatgaaagcttgctggatttcacaagttagcggcggacgggtgagtaacgcgtgagcaacctgtcctctacagggggataagatcccgaaagggattctaataccgcatgagaccacagaaggacatccttcaggggtcaaaggagcaatccggta

SEQ ID NO: 2700 - DNA, 225 bp, Unknown
  bacterial strain Ascusb_2107 encodes 16S rRNA
agagtttgatcatggctcaggacgaacgctggcggcgtgcctaacacatgcaagtcgagcggagacttatcagatgagagcttcggcaggattcgggtaagttttagcggcggacgggtgagtaacgcgtgagcaatctgtctcagacagggggataacgcagcgaaagttgcactaataccgcatgagaccacagagccacatggcttaggggtcaaaggagca

SEQ ID NO: 2701 - DNA, 225 bp, Unknown
  bacterial strain Ascusb_2516 encodes 16S rRNA
agagtttgatcatggctcaggatgaacgctagcggcaggcttaacacatgcaagtcgaggggcagcgcgaggtagcaataccttggcggcgaccggcgcacgggtgcgtaacgcgtatgcaacctacccactacagggggataacggagggaaacttccactaatatcccatggtgtcaccgaatcgcatggtttggtgactaaagctacggtggtagtggacgg

SEQ ID NO: 2702 - DNA, 225 bp, Unknown
  bacterial strain Ascusb_1675 encodes 16S rRNA
agagtttgatcctggctcaggatgaacgctagcgacaggcctaacacatgcaagtcgagcggcagcacctcgggtggcgagcggcgcacgggtgagtaacgcgtatgtaacctgcccatgagtgggggatagcccggtgaaaaccggattaataccccatgataccattgtctgacatcatttaatggttaaagattcattgctcatggatggacatgcgttgga

SEQ ID NO: 2703 - DNA, 225 bp, Unknown
  bacterial strain Ascusb_3734 encodes 16S rRNA
agagtttgatcatggctcaggatgaacgctagctacaggcttaacacatgcaagtcgaggggcagcatgaaagtagcttgctacttttgatggcgaccggcgcacgggtgcgtaacacgtatccaatctacccatggctcagggatagcctttcgaaagaaagattaatacctgatggcttcactttcccgcatggggaggtgaataaagatttatcggcgatgg

SEQ ID NO: 2704 - DNA, 225 bp, Unknown
  bacterial strain Ascusb_2477 encodes 16S rRNA
agagtttgatcatggctcaggatgaacgctggcggcgtgcttaacacatgcaagtcgaacgaagctctttgaacggaggattcgtctgaagtgagaagatgacttagtggcggacgggtgagtaacgcgtggggaatctgccccgtaccgggggataacacttagaaataggtgctaataccgcataagcgcacggtgtcgcatgacacagtgtgaaaaactccg

SEQ ID NO: 2705 - DNA, 225 bp, Unknown
  bacterial strain Ascusb_20164 encodes 16S rRNA
agagtttgatcatggctcaggacgaacgctggcggcgtgcctaacacatgcaagtcgaacggagttatgtcacgaagttcttcggagcggacgacgtagcttagtggcggacgggtgagtaacgcgtgagcaacctgcctttcagagggggacaacggttggaaacgaccgctaataccgcatgacatgactggagcgcatgatccggtcatcaaagattttatc

SEQ ID NO: 2706 - DNA, 225 bp, Unknown
  bacterial strain Ascusb_1876 encodes 16S rRNA
agagtttgatcatggctcagaacgaacgctggtggcgtgtcttatacatgcaagtcgagcggtccagcaatggatagcggcgaacgggtgagtaacgcgtaagcaatctgccccctgctcgggaatagccgtgccaacgcgcggataataccggatatcgtggggccctgcatagggccttgacaaaagatttatcggcaggggatgagcttgcgtccgattagc

SEQ ID NO: 2707 - DNA, 225 bp, Unknown
  bacterial strain Ascusb_12149 encodes 16S rRNA
agagtttgatcatggctcaggatgaacgctggcggcgtgcctaacacatgcaagtcgaacggggttaaagggaaattttcggatggacctttaacttagtggcggacgggtgagtaacgcgtggataacctgcctcacacagggggatagcagctggaaacggctggtaataccgcataagaccacagcaccgcatggtgcaggggtaaaagatttatcggtgtg

SEQ ID NO: 2708 - DNA, 225 bp, Unknown
  bacterial strain Ascusb_2231 encodes 16S rRNA
agagtttgatcatggctcaggatgaacgctggcggcgtgcttaacacatgcaagtcgaacggatcatggatgaaagcttcggccggaatccatggttagtggcggacgggtgagtaacgcgtgggtaacctgcctcacactgggggataacgattggaaacgatcgctaataccgcataagaccacggtgccgcatggcacagaggtaaaaactccggtggtgtg

SEQ ID NO: 2709 - DNA, 225 bp, Unknown
  bacterial strain Ascusb_2421 encodes 16S rRNA
agagtttgatcctggctcaggatgaacgctggcggcgtgcttaacacatgcaagtcgaacggagttaacgcgctgaggagagcttgctcaaatcttgcgttaacttagtggcggacgggtgagtaacgcgtggataacctgccttataccgggggataacacttagaaataggtgctaataccgcataagcgcacgctttcgcatgaaagagtgtgaaaaactcc

SEQ ID NO: 2710 - DNA, 225 bp, Unknown
  bacterial strain Ascusb_2029 encodes 16S rRNA
agagtttgatcatggctcagaacgaacgctggcggcgcgtcttaagcatgcaagtcgaatggcaagatagagcttgctctatcctagaatggcggactggtgagtaacgcgtgggtgacgtaccctttagacggggatagctcctagaaataggagataataccggataagctgtaactctttagaggggttacaggaaaggatcttttgatccgctgaaggagc

SEQ ID NO: 2711 - DNA, 225 bp, Unknown
  bacterial strain Ascusb_12943 encodes 16S rRNA
agagtttgatcatggctcaggattaacgctggcggcatgcctaagacatgcaagtcgaacgagatggtccattgaaaaatgcgtgcttgcacaaatttggatttgggttgccatctagtggcgaaagggtgagtaacacgtgggtaatctacctttgagtctggaataacagttagaaatgattgctaatgccggatgatatgtaaaacgatacgtcttttgtat

SEQ ID NO: 2712 - DNA, 225 bp, Unknown
  bacterial strain Ascusb_781 encodes 16S rRNA
agagtttgatcatggctcaggatgaacgctggcggcgtgcttaacacatgcaagtcgaacgaagcactttatttgaagccttcgggtgaattattttgtgacttagtggcggacgggtgagtaacgcgtgggtaacctgcctcatacaccgggataacagttggaaacggctgctaataccggataagcatacagtaccgcatggtacagtgtgaaaaactcagg

SEQ ID NO: 2713 - DNA, 225 bp, Unknown
  bacterial strain Ascusb_791 encodes 16S rRNA
agagtttgatcatggctcaggacgaacgctggcggcgtgcctaacacatgcaagtcgaacggacgaagggagcttgctccctgagttagtggcgaacgggtgagtaacgcgtgagcaacctgcctttcagagggggacaacggttggaaacgaccgctaataccgcatgaaacagtcggaccgcatgatctgactgtcaaagatttatcgctgaaagatgggctc

SEQ ID NO: 2714 - DNA, 225 bp, Unknown
  bacterial strain Ascusb_4098 encodes 16S rRNA
agagtttgatcatggctcaggatgaacgctagctacaggcttaacacatgcaagtcgaggggcagcgggaagtcagcttgctgactttgccggcgaccggcgcacgggtgagtaacgcgtatccaaccttccccttagtagggcatagcccgtagaaatgcggattaataccctatgttattcgtcgaggacatctgaagtgaatcaaaggtttaccgctaaggg

SEQ ID NO: 2715 - DNA, 225 bp, Unknown
  bacterial strain Ascusb_1056 encodes 16S rRNA
agagtttgatcatggctcaggatgaacgctggcggcgtgcttaacacatgcaagtcgaacgaagcacataagacggaatccttcgggaggaagatttatgtgactgagtggcggacgggtgagtaacgcgtgggtaacctgccctgtacagggggataacagttagaaatgactgctaataccgcataagcgcacagtaccgcatggtacagtgtgaaaaactcc

SEQ ID NO: 2716 - DNA, 225 bp, Unknown
  bacterial strain Ascusb_5611 encodes 16S rRNA
agagtttgatcatggctcagaacgaacgctggcggcgcgtcttaagcatgcaagtcgagcggtaagattggtgcttgcactaatcctagagcggcggactggtgagtaacgcgtgggtgacgtacctttgtgacggggacagctcctagaaataggagataataccggatacgctgcatgttgtcagaggacatgcaggaaaggatcttttgatccgcacagaga

SEQ ID NO: 2717 - DNA, 225 bp, Unknown
  bacterial strain Ascusb_1150 encodes 16S rRNA
agagtttgatcatggctcaggatgaacgctggcggcgtgcctaatacatgcaagtcgaacgagggtgcttgcaccctagtggcgaacgggtgagtaacacgtaggtaacctgcccttaagcttgggatacccagaggaaactttggctaataccggataacaacagaagaggcatctcttcagtttgaaaggccctttacggggtcacttaaggatggacctgcg

SEQ ID NO: 2718 - DNA, 225 bp, Unknown
  bacterial strain Ascusb_1688 encodes 16S rRNA
agagtttgatcatggctcaggatgaacgctagctacaggcttaacacatgcaagtcgaggggcagcatgaagtttgcttgcaaactttgatggcgaccggcgcacgggtgagtaacgcgtatccaaccttcccatcactcagggatagcccgccgaaaggcgaattaatacctgatggtctcctttgcagacatctaacgaggagtaaagatttattggtgatgg

SEQ ID NO: 2719 - DNA, 225 bp, Unknown
  bacterial strain Ascusb_1802 encodes 16S rRNA
agagtttgatcatggctcaggatgaacgctggcggcgtgcttaacacatgcaagtcgaacggagcctatcgagtgcttgcacttgagaaagcttagtggcggacgggtgagtaacgcgtgggtaacctgccctgtaccgggggataacagtcggaaacgactgctaataccgcataagcccacatgaccgcatggtcaagggggaaaaactccggtggtacagga

SEQ ID NO: 2720 - DNA, 225 bp, Unknown
  bacterial strain Ascusb_2754 encodes 16S rRNA
agagtttgatcatggctcaggatgaacgctagcgacaggcctaacacatgcaagtcgaggggcagcgcgggagaagcttgcttttcctggcggcgaccggcgcacgggtgcgtaacaggtgtgcaatctgtccatagtcggggaatagcccagcgaaagttggattaaagctccatgtgagtagaagccgcatgacttttacttgaaacgtaaggactatgggtg

SEQ ID NO: 2721 - DNA, 225 bp, Unknown
  bacterial strain Ascusb_4704 encodes 16S rRNA
agagtttgatcctggctcaggatgaacgctagctacaggcctaacacatgcaagtcgaggggcagcagatcgaaagcttgcttttgatgctggcgaccggcgaatgggtgagtcacgcgtgtccaacctgccccccgcccggggatagcccttggaaatgaggattaagacccgataggtgcgccttccgcatggcgagcgcatgaaactggcgagggatgggga

SEQ ID NO: 2722 - DNA, 225 bp, Unknown
  bacterial strain Ascusb_1094 encodes 16S rRNA
agagtttgatcatggctcaggatgaacgctggcggcgtgcctaacacatgcaagtcgaacgaagcttggggaacggagattcgtcgaagagaaccaagacttagtggcggacgggtgagtaatgtatgagcaacctgcctttcagagggggacaacagttggaaacgactgctaataccgcgtaacgtatgacgggggcatccctgacataccaaaggagcaatc

SEQ ID NO: 2723 - DNA, 225 bp, Unknown
  bacterial strain Ascusb_114 encodes 16S rRNA
agagtttgatcatggctcaggatgaacgctggcggcgtgcttaacacatgcaagtcgaacgggaattacattttagcttgctaagttgtaattctagtggcggacgggtgagtaacgcgtgggtaacctgccttataccgggggacaacagttggaaacgactgctaataccgcataagcgcacgggaaggcatctttctgtgtgaaaaactccggtggtataag

SEQ ID NO: 2724 - DNA, 225 bp, Unknown
  bacterial strain Ascusb_19138 encodes 16S rRNA
agagtttgatcctggctcagaacgaacgctggtggcgtgtcttatacatgcaagtcgagcgaggcagcaatgccgagcggcgaacgggtgagtaacgcgtaagcaatctgccccgtatcaggaaatacccgtgccaacgcgcggttaatgtccaggagagtggccagctgcatggctggttgactagagatttatcggtacgggatgagcttgcgtccgattagc

SEQ ID NO: 2725 - DNA, 225 bp, Unknown
  bacterial strain Ascusb_2845 encodes 16S rRNA
agagtttgatcatggctcaggacgaacgctggcggcgtgcttaacacatgcaagtcgaacgaggttatgttgaggaaggcttcggccggaattgatataaccgagtggcggacgggtgagtaacgcgtgagcaacctgtcttacacagggggataacactccgaaaggagcgctaataccgcataagaccacgatgccacatggcaatggggtaaaaggagcaat

SEQ ID NO: 2726 - DNA, 225 bp, Unknown
  bacterial strain Ascusb_1351 encodes 16S rRNA
agagtttgatcctggctcaggattaacgctggcggcatgcctaatacatgcaagtcaaacgggaagcttcggcttctagtggcgaacgggtgagtaacacgtaggcaatctgtcctaaagattgggataacagctggaaacggctgataataccggataatagaagatatcgcatgataactttttgaaagacgcaattgtgtcactttaggaggagcctgcggc

SEQ ID NO: 2727 - DNA, 225 bp, Unknown
  bacterial strain Ascusb_542 encodes 16S rRNA
agagtttgatcatggctcaggatgaacgctggcggcgtgcttaacacatgcaagtcgaacgaagcactggtcttgaagttttcggacagatagacctttgacttagtggcggacgggtgagtaacgcgtgggcaacctgccgtatgcagggggacaacagttggaaacgactgctaataccgcataagcgcacggggacgcatgttcctgtgtgaaaagccttaa

SEQ ID NO: 2728 - DNA, 225 bp, Unknown
  bacterial strain Ascusb_3160 encodes 16S rRNA
agagtttgatcctggctcagaacgaacgctggcggcgcgtcttaagcatgcaagtcgagcggtaagtcgggagcttgctcctgacctagagcggcggactggtgagtaacgcgtgggtgacgtacctctgtgacggggacagctcctagaaataggagataataccggatacgctgcatgttgtcagaggacatgcaggaaaggatcttttgattcgcacagaga

SEQ ID NO: 2729 - DNA, 225 bp, Unknown
  bacterial strain Ascusb_11151 encodes 16S rRNA
agagtttgatcctggctcaggatgaacgctggcggcatgcctaagacatgcaagtcgaacgaagtggcccaatgaagatgaagtgcttgcactgatttggaaatggattcccacttagtggcagacgggtgagtaacacgtgggtaacctaccccttagtctgggacaactattggaaacgatagctaataccggatgattcatagaaggataaccttttatgct

SEQ ID NO: 2730 - DNA, 225 bp, Unknown
  bacterial strain Ascusb_631 encodes 16S rRNA
agagtttgatcatggctcagaacgaacgctggcggcgcgtcttaagcatgcaagtcgagcggtaagttatagcttgctataacctagagcggcggactggtgagtaacgcgtgggtgacgtacccttgtgacggggacagctcctagaaataggagataataccggatacgctgtgcattgtcagaggatgtacaggaaaggttcttttgaatcgcacaaggagc

SEQ ID NO: 2731 - DNA, 225 bp, Unknown
  bacterial strain Ascusb_1195 encodes 16S rRNA
agagtttgatcatggctcaggatgaacgctggcggcgtgcttaacacatgcaagtcgagcgagaagctcgtgaacgattcttcggatgagtgatcgagtggaaagcggcggacgggtgagtaacgcgtaggcaacctgccccatacaaagggatagctactggaaacggtaattaatacctcataacgcagttttaccgcatgatagaactgccaaagatttatc

SEQ ID NO: 2732 - DNA, 225 bp, Unknown
  bacterial strain Ascusb_4808 encodes 16S rRNA
agagtttgatcctggctcaggatgaacgctagctacaggcttaacacatgcaagtcgaggggcagcatgattctagcttgctagaattgatggcgaccggcgcacgggtgagtaacgcgtatccaaccttccctatagtagaggatagcccggcgaaagtcggattaatactctatgttgttcaatgcggacatctaagttgaaccaaaggtttaccgctatagg

SEQ ID NO: 2733 - DNA, 225 bp, Unknown
  bacterial strain Ascusb_3521 encodes 16S rRNA
agagtttgatcatggctcaggatgaacgctggcggcgtgcctaacacatgcaagtcgaacgaagcactggagacggagattcgtcgaagtttccattgacttagtggcggacgggtgagtaatgtatgagcaacctgcctttcagagggggacaacagttggaaacgactgctaataccgcataatgtatagacgagacatcttgtttataccaaaggagcaatc

SEQ ID NO: 2734 - DNA, 225 bp, Unknown
  bacterial strain Ascusb_2396 encodes 16S rRNA
agagtttgatcatggctcaggatgaacgctggcggcgtgcttaacacatgcaagtcgaacgaagcactttacttagatcccttcggggtgacgagttttgtgactgagtggcggacgggtgagtaacgcgtgggtaacctgccttacacagggggataacagttagaaatgactgctaataccgcataacccgctagtgtcgcatgacacagacggaaaagattt

SEQ ID NO: 2735 - DNA, 225 bp, Unknown
  bacterial strain Ascusb_5276 encodes 16S rRNA
agagtttgatcctggctcagaacgaacgctggcggcgcgtcttaagcatgcaagtcggacggcaagacagaagcttgcttctgtcctagagtggcggactggtgagtaacgcgtgggtgattcacccccttgatgggaatagccggtagaaataccggataatgccgaataagctgtgatgtgtcagaggcatcacaggaaaggaactttagttccgcgagggga

SEQ ID NO: 2736 - DNA, 225 bp, Unknown
  bacterial strain Ascusb_6783 encodes 16S rRNA
agagtttgatcatggctcagaacgaacgctggcggcgcgtcttaagcatgcaagtcgagcggtaagttggaagcttgcttctaacctagagcggcggactggtgagtaacgcgtgggtgacgtacctttgtgacggggacagctcctagaaataggagataataccggatacgctgcatgttgtcagaggacatgcaggaaaggatcttttgattcgcacagaga

SEQ ID NO: 2737 - DNA, 225 bp, Unknown
  bacterial strain Ascusb_467 encodes 16S rRNA
agagtttgatcatggctcaggatgaacgctggcggcgtgcttaacacatgcaagtcgaacggaaacttaatgaaacctagtgatttaagttttagtggcggacgggtgagtaacgcgtgggtaacctgccgtatgcagggggataacagttagaaatgactgctaataccgcataagaccacagtctcgcatgagacaggggtaaaaactccggtggcatacgat

SEQ ID NO: 2738 - DNA, 225 bp, Unknown
  bacterial strain Ascusb_2761 encodes 16S rRNA
agagtttgatcctggctcagaacgaacgctggcggcgcgttttaagcatgcaagtcgagcggcaaggacttcggtccctagagcggcggacgggtgagtaacacgtggataatctgccctgcagtctggaataccccatggaaacatgggctaatgccggatgcgacggagaggcgcaggcctctctgggaaagctcccatgggagcgctgcaggatgagtccgc

SEQ ID NO: 2739 - DNA, 225 bp, Unknown
  bacterial strain Ascusb_3233 encodes 16S rRNA
agagtttgatcatggctcaggacgaacgctggcggcgcgcctaacacatgcaagtcgaacggacgaagggagcttgctccccgagttagtggcggacgggtgagtaacacgtgagcaacctgcctttcagagggggacaacagttggaaacgactgctaataccgcataacgtggtttggaggcatcttcgaactaccaaagatttatcgctgaaagatgggctc

SEQ ID NO: 2740 - DNA, 225 bp, Unknown
  bacterial strain Ascusb_604 encodes 16S rRNA
agagtttgatcatggctcagaatgaacgctggcggcatggattaggcatgcaagtcgaacggggccctccggggcccagtggcggaagggtgagtaacacgtgagcaacccgcccccaaggccggaacaagcgctggaaacggcgtctgaaaccggatgaggacccccctcgcatgtgggggcgtccaaatattcataccctggggatgggctcgcggcccatta

SEQ ID NO: 2741 - DNA, 225 bp, Unknown
  bacterial strain Ascusb_2743 encodes 16S rRNA
agagtttgatcatggctcaggatgaacgctagcgacaggcctaacacatgcaagtcgagcggcagcacctcgggtggcgagcggcgcacgggtgagtaacgcgtatgtaacctgcccatgagtgggggatagcccggtgaaaaccggattaataccccatgacaccaatgtctgacatcacttattggttaaagattcattgctcatggatggacatgcgttgga

SEQ ID NO: 2742 - DNA, 225 bp, Unknown
  bacterial strain Ascusb_6424 encodes 16S rRNA
agagtttgatcatggctcaggatgaacgctagcgacaggcttaacacatgcaagtcgaggggcagcgcgggggtagcaatacctttggcggcgaccggcgcactggtgagtaacacgtatgcgacctgccccggacagggggataaacccgggaaactgggcctaataccccatatgccgtgaggacgcatgtcctttcggtgaaagatccgtcggtccgggatg

SEQ ID NO: 2743 - DNA, 225 bp, Unknown
  bacterial strain Ascusb_2895 encodes 16S rRNA
agagtttgatcatggctcaggatgaacgctggcggcgtgcctaatacatgcaagtcgagcgaggtagcttgctacctagcggcgaacgggtgagtaacacgtaggtaacctgcctttaagactgggatacccaggcgaaagcttggctaataccggataacaacggggatcgcatgatctccgcttgaaaggtgcgtttgcaccacttttagatggacctgcggc

SEQ ID NO: 2744 - DNA, 225 bp, Unknown
  bacterial strain Ascusb_1256 encodes 16S rRNA
agagtttgatcatggctcaggatgaacgctagcggcaggcttaacacatgcaagtcgaggggtaacagggcgtagcaatacgccgctgacgaccggcgcacgggtgcgtaacgcgtatacaacctacctgtaacagggggataacggagtgaaaactccactaataccccatattgacgagtcttcgcatgggggttcgtcgaaagcttcggtggttacggatgg

SEQ ID NO: 2745 - DNA, 225 bp, Unknown
  bacterial strain Ascusb_1507 encodes 16S rRNA
agagtttgatcatggctcaggacgaacgctggcggcgcgcctaacacatgcaagtcgaacggactttatggaaactgaggcttcggcggacgaagaagtaaagttagtggcgaacgggtgagtaacacgtgaggaaccaacctttcagagggggataacacttagaaataggtgctaataccgcataagaccacagtgaggcatctcacaggggtcaaaggagca

SEQ ID NO: 2746 - DNA, 225 bp, Unknown
  bacterial strain Ascusb_10086 encodes 16S rRNA
agagtttgatcatggctcaggatgaacgctagctacaggcttaacacatgcaagtcgcggggcatcgcatggggcggcaacgtccctggcggcgaccggcggatgggtgagtaacgcgtatccaacctggccccctctccgggacagcccctcgaaagagggattaataccggatgttcccgtttcgccgcatggcgtgatgggcaaaggcttcggtcggaaggg

SEQ ID NO: 2747 - DNA, 225 bp, Unknown
  bacterial strain Ascusb_20491 encodes 16S rRNA
agagtttgatcatggctcaggatgaacgctagctacaggcttaacacatgcaagtcgaggggcagcatagtcaaagtttgctttgattgatggcgaccggcgcacgggtgagtaacgcgtatccaaccttccccttagtagggcatagcccggcgaaagtcggattaataccctatgttgtgtcatgaggacatctgaataacactaaagatttatcgctaaggg

SEQ ID NO: 2748 - DNA, 225 bp, Unknown
  bacterial strain Ascusb_1115 encodes 16S rRNA
agagtttgatcatggctcaggacgaacgctggcggcgtgcctaacacatgcaagtcgagcggagattgcttagatgagagcttcggcaggattccgagtaatttcagcggcggacgggtgagtaacgcgtgagcaatctgtctcagacagggggataacgcagcgaaagttgcactaataccgcatgagaccacaacgccacatggcgaaggggtcaaaggagca

SEQ ID NO: 2749 - DNA, 225 bp, Unknown
  bacterial strain Ascusb_1344 encodes 16S rRNA
agagtttgatcctggctcagaacgaacgctggcggcaggcttaacacatgcaagttgaacgggatttagttagtgcttgcactaactgatgagagtagcgcactggtgagtaacacgtgggaacatgccttttggtgggggacaacagttggaaacgactgctaataccgcataagcccggaaggggaaagattaattgccgaaagattggcccgcggaagatta

SEQ ID NO: 2750 - DNA, 225 bp, Unknown
  bacterial strain Ascusb_1172 encodes 16S rRNA
agagtttgatcatggctcaggatgaacgctggcggcatgcctaacacatgcaagtcgaacggagctattacggaagcttgcttttgttctagcttagtggcggacgggtgagtaacgcgtgagaaacctgcccttaagtggggaataacaccgagaaatcggtgctaataccgcataatatctctggatcgcatgttcctggagatcaaaggatttattcgctta

SEQ ID NO: 2751 - DNA, 225 bp, Unknown
  bacterial strain Ascusb_307 encodes 16S rRNA
agagtttgatcatggctcaggatgaacgctggcggcgtgcctaacacatgcaagtcgaacggtgatgactgatattttcggatggatttcatcatagtggcggacgggtgagtaacgcgtggataacctgcctcgtactggggaatagcagctggaaacggctggtaataccgcataagcgcacggacccgcatgagtctgtgtgaaaagatttatcggtacgag

SEQ ID NO: 2752 - DNA, 225 bp, Unknown
  bacterial strain Ascusb_1381 encodes 16S rRNA
agagtttgatcatggctcaggatgaacgctggcggcgtgcttaacacatgcaagtcgaacgaagcacttgatccgattttttcggaatgaagatcttgtgacttagtggcggacgggtgagtaacgcgtgggcaatctgccccataccgggggacaacagttggaaacgactgctaataccgcataagcgcacggagccgcatggttctgtgtgaaaaactccgg

SEQ ID NO: 2753 - DNA, 225 bp, Unknown
  bacterial strain Ascusb_2615 encodes 16S rRNA
agagtttgatcatggctcagaacgaacgctggcggcgcgtcttaagcatgcaagtcgagcggtaagtcgggagcttgctcctgacctagagcggcggactggtgagtaacgcgtgggtgacgtacctttgtgacggggacagctcctagaaataggagataataccggatacgctgtaacatgtcagaggtgttacaggaaaggatcttttgattcgcacagaga

SEQ ID NO: 2754 - DNA, 225 bp, Unknown
  bacterial strain Ascusb_45 encodes 16S rRNA
agagtttgatcatggctcaggatgaacgctagctacaggcttaacacatgcaagtcgaggggaaacgattagaggtgcttgcaccactaaggcgtcgaccggcgcacgggtgagtaacgcgtatccaacctgccccatggtaaggaataatccgtagaaatgcggtctaataccttatgtgctccgaagaggacatctgatttggagtaaagatttatcgccatg

SEQ ID NO: 2755 - DNA, 225 bp, Unknown
  bacterial strain Ascusb_4185 encodes 16S rRNA
agagtttgatcatggctcaggatgaacgctagctacaggcttaacacatgcaagtcgcggggcagcatgatctcagcttgctgaggttgatggcgaccggcgcacgggtgagtaacgcgtatccaaccttccctatagtagaggatagcccggcgaaagtcggattaatactctatgttttccgttgcggacatctaagacggaacaaaggcttgccgctatagg

SEQ ID NO: 2756 - DNA, 225 bp, Unknown
  bacterial strain Ascusb_3077 encodes 16S rRNA
agagtttgatcctggctcaggacgaacgctggcggcgtgcctaacacatgcaagtcgaacggactgattcgcttcggtgatgaaagttagtggcggacgggtgagtaacgcgtgagtaacctgcctttcagagggggataacgtttggaaacgaacgctaataccgcataacatatcgttgtcgcatggcagtgatatcaaaggagcaatccgctgaaagatgga

SEQ ID NO: 2757 - DNA, 225 bp, Unknown
  bacterial strain Ascusb_1419 encodes 16S rRNA
agagtttgatcatggctcaggatgaacgctagcggcaggcttaacacatgcaagtcgaggggcagcgcgaggtagcaatactttggcggcgaccggcgcacgggtgcgtaacgcgtatgcaacctacccactacagggggataacggagggaaacttccactaatatcccatggtgttgcggaaccgcatggttctgtaactaaagcttcggtggtagtggatgg

SEQ ID NO: 2758 - DNA, 225 bp, Unknown
  bacterial strain Ascusb_4121 encodes 16S rRNA
agagtttgatcatggctcaggacgaacgctggcggcgcgcctaacacatgcaagtcgaacggagttaagagagcttgctttcttaacttagtggcggacgggtgagtaacacgtgagcaacctgcctttcagagggggacaacagttggaaacgactgctaataccgcataacgtcatttgaaggcatcttcgggtgaccaaagatttatcgctgaaagatgggc

SEQ ID NO: 2759 - DNA, 225 bp, Unknown
  bacterial strain Ascusb_1436 encodes 16S rRNA
agagtttgatcatggctcaggatgaacgctagcgacaggcctaacacatgcaagtcgaggggcagcgggaaggaagcttgcttcctttgccggcgaccggcgcacgggtgagtaacgcgtatgcaacctggccgcagttgcgggatagccttccgaaagggagattaacaccgcatgaggccggagaggggcatccctttccggtgaaaagtcaatgactgcgga

SEQ ID NO: 2760 - DNA, 225 bp, Unknown
  bacterial strain Ascusb_4797 encodes 16S rRNA
agagtttgatcatggctcaggacgaacgctggcggcgtgcttaacacatgcaagtcgaacggggattaccgagcggaaggcttcggccggaaggttggtaattccagtggcggacgggtgagtaacgcgtgagcaatctgtcccagacaggggaataacacttggaaacaggtgctaataccgcataagaccacgggatcgcatggttcaggggtaaaaggagga

SEQ ID NO: 2761 - DNA, 225 bp, Unknown
  bacterial strain Ascusb_591 encodes 16S rRNA
agagtttgatcatggctcaggacgaacgctggcggcatgcctaacacatgcaagtcgaacggagaattgagagcttgcttttaattcttagtggcggacgggtgagtaacgcgtgagcaacctgcctctcagtggggaataatgtactgaaaaggacactaataccgcatgatgtatcggagtcgcatggctttgataccaaagatttatcgctgagagatgggc

SEQ ID NO: 2762 - DNA, 225 bp, Unknown
  bacterial strain Ascusb_2981 encodes 16S rRNA
agagtttgatcatggctcaggatgaacgctggcggcgtgcttaacacatgcaagtcgaacgaagctacttttcacgatcccttcggggtgacgagttgtagactgagtggcggacgggtgagtaacgcgtgggtaacctgccctatacagggggacaacagctggaaacggctgctaataccgcataagcgcacaggagggcatcctctagtgtgaaaaactccg

SEQ ID NO: 2763 - DNA, 225 bp, Unknown
  bacterial strain Ascusb_3089 encodes 16S rRNA
agagtttgatcatggctcaggatgaacgctggcggcgtgcttaacacatgcaagtcgaacggagcttaattggaaagcttgcttttcgtttaagcttagtggcggacgggtgagtaacgcgtgagcaacctgccccgaagtggggaataacaccgagaaatcggtgctaataccgcataatgtcggaggaccgcatgatccaccgaccaaaggatttattcgctt

SEQ ID NO: 2764 - DNA, 225 bp, Unknown
  bacterial strain Ascusb_1149 encodes 16S rRNA
agagtttgatcatggctcagagcgaacgctagcggaatgctttatacatgcaagtcgaacggattttgatttttgtagcaatacaaagattacgattagtggcgaacgggtgagtaatagttaggaacttgccgaatagtgggggacaacagttagaaatgactgctaataccgcatactcccgagaggggaaagatttattgctattcgagaggcctaaccacg

SEQ ID NO: 2765 - DNA, 225 bp, Unknown
  bacterial strain Ascusb_4240 encodes 16S rRNA
agagtttgatcctggctcaggatgaacgctagctacaggcttaacacatgcaagtcgaggggcatcatgtagtctgcttgcaggctatgatggcgaccggcgcacgggtgagtaacgcgtatccaacctgccctttactacggtatagcccagcgaaagttggattaatcccgtatattgtcgctcgatggcatctgagtgcgacgaaagatttatcggtagagg

SEQ ID NO: 2766 - DNA, 225 bp, Unknown
  bacterial strain Ascusb_2499 encodes 16S rRNA
agagtttgatcatggctcaggatgaacgctggcggcgtgcctaacacatgcaagtcgaacgaggtcttttatcttggagattcgtcaaagagatttctgaccgagtggcggatgggtgagtaacgcgtggagaacctgcccttatcagggggataacaactggaaacggttgacaataccgcatacgctcttgtgatcgcatgatcgtgagaggaaagatttatc

SEQ ID NO: 2767 - DNA, 225 bp, Unknown
  bacterial strain Ascusb_4408 encodes 16S rRNA
agagtttgatcctggctcaggacgaacgctggcggcgtgcctaacacatgcaagtcgaacggaactgacgccggttcttcggaaccattgtcagtttagtggcggacgggtgagtaacgcgtgagtaacctgcctctgagaggggaataacgttttgaaaagaacgctaataccgcataacatatataagtcgcatggcttatatatcaaagattttatcgctca

SEQ ID NO: 2768 - DNA, 225 bp, Unknown
  bacterial strain Ascusb_6154 encodes 16S rRNA
agagtttgatcatggctcaggacgaacgctggcggcgtgcttaacacatgcaagtcgaacgaggatcaatagattgagagcttcggcaggattgaaattgattcgagtggcggacgggtgagtaacgcgtgagcaacctgtcccagacagggggataacacttggaaacaggtgctaataccgcataagaccacggtatcacatggtactggggtaaaaggtgta

SEQ ID NO: 2769 - DNA, 225 bp, Unknown
  bacterial strain Ascusb_6082 encodes 16S rRNA
agagtttgatcatggctcaggacgaacgctggcggcgtgcttaacacatgcaagtcgaacggggattaccgagcggaaggcttcggtcggaaggttggtaattctagtggcggacgggtgagtaacgcgtgaacaatctgtcccagacaggggaataacacttggaaacaggtgctaataccgcatgagaccacgggtaggcatctacctgaggtaaaaggagta

SEQ ID NO: 2770 - DNA, 225 bp, Unknown
  bacterial strain Ascusb_2147 encodes 16S rRNA
agagtttgatcatggctcaggatgaacgctggcggcgtgcctaatacatgcaagtcgaacggagcacttcggtgcttagtggcgaacgggtgagtaatatatgaacaacctacccctttgaccgggataacacactgaaaagcgtgctaataccggataggcgatcgagaggcatctcttgattattaaaggagcgcatgctccacattgggatgggttcatatc

SEQ ID NO: 2771 - DNA, 225 bp, Unknown
  bacterial strain Ascusb_1271 encodes 16S rRNA
agagtttgatcctggctcaggatgaacgctggcggcgtgcttaacacatgcaagtcgagcgaagcactggacttgatttcttcggattgacggtcctttgactgagcggcggacgggtgagtaacgcgtggggaacctgccccataccgggggataacagctggaaacggctgctaataccgcataagcgcacgaggaggcatctctttgtgtgaaaaactccgg

SEQ ID NO: 2772 - DNA, 225 bp, Unknown
  bacterial strain Ascusb_2512 encodes 16S rRNA
agagtttgatcctggctcagaacgaacgctggcggcatggattaggcatgcaagtcgaacgggagcagcaatgctccagtggcgcaagggtgaggaacacgtgaacaacctgccttcgagttggggatagcttctggaaacgggagataataccgaataacatcaccggatcgcatgatttggtgatcaaagcagcaatgcgcttgaagaggggttcgcgtccca

SEQ ID NO: 2773 - DNA, 225 bp, Unknown
  bacterial strain Ascusb_6616 encodes 16S rRNA
agagtttgatcctggctcagaacgaacgctggcggcgcgtcttaagcatgcaagtcgaatggcaagatagagcttgctctatcctagaatggcggactggtgagtaacgcgtgggtgacgtaccctttagatggggatagctgatagaaatatcagataataccgaataagctgcatgaggttagagctcatgcaggaaaggatcttttgatccgctgaaggagc

SEQ ID NO: 2774 - DNA, 225 bp, Unknown
  bacterial strain Ascusb_5471 encodes 16S rRNA
agagtttgatcctggctcaggatgaacgctggcggcgtgcttaacacatgcaagtcgaacggagtattgacgctgacgagcagagtagcttgctacgaagcaaatcttgttgatacttagtggcggacgggtgagtaacgcgtgggtaacctgccatatacagggggataacacttagaaataggtgctaataccgcataagcgcacagtaccgcatggtacagt

SEQ ID NO: 2775 - DNA, 225 bp, Unknown
  bacterial strain Ascusb_9386 encodes 16S rRNA
agagtttgatcatggctcaggatgaacgctggcggcatgcctaagacatgcaagtcgaacgaggtgacccattgaagtggagtgcttgcacaatatggatatggattttcacctagtggcgcaagggtgagtaacacgtgggtaatctgcctttaagactgggataacaattggaaacgattgctaataccggatgaaatgcacgacataaagttgtgtagtaaa

SEQ ID NO: 2776 - DNA, 225 bp, Unknown
  bacterial strain Ascusb_2831 encodes 16S rRNA
agagtttgatcatggctcaggacgaacgctggcggcgtgcttaacacatgcaagtcgaacgaggttattttgatgagatcttcggatggatttgaaataaccgagtggcggacgggtgagtaacgcgtgagcaacctgtcttctacagggggataacgctccgaaaggagtgctaataccgcataagaccacggagccacatggttttgaggtcaaaggagaaat

SEQ ID NO: 2777 - DNA, 225 bp, Unknown
  bacterial strain Ascusb_1636 encodes 16S rRNA
agagtttgatcatggctcaggatgaacgctggcggcgtgcctaatacatgcaagtcgaacgctggatatccagcttgctggattgaaggagtggcgaacgggtgagtaatacataagcaacctgcccacgaagactgggataatctctggaaacggggactaagaccggataggtaataacgaggcatctcgatattattaaaggtgagaaacactggtggatgg

SEQ ID NO: 2778 - DNA, 225 bp, Unknown
  bacterial strain Ascusb_20843 encodes 16S rRNA
agagtttgatcatggctcaggatgaacgctagctacaggcttaacacatgcaagtcgaggggcagcatgttggttgcttgcaaccaatgatggcgaccggcgcacgggtgagtaacgcgtatccaaccttccccatagtagaggatagcccggcgaaagtcggattaatactctatgttgtgtcatgaggacatctgaataacaccaaagatttatcgctatggg

SEQ ID NO: 2779 - DNA, 225 bp, Unknown
  bacterial strain Ascusb_4119 encodes 16S rRNA
agagtttgatcctggctcaggacgaacgctggcggcgtgcctaacacatgcaagtcgagcggagacatttggaaagcttgctttttggatgtttcagcggcggacgggtgagtaacgcgtgagcaacctgcctttaacagggggataacgcatcgaaagatgtgctaataccgcatgagaccacaacactacatggtgaaagggtcaaaggagcaatccggttaa

SEQ ID NO: 2780 - DNA, 225 bp, Unknown
  bacterial strain Ascusb_2508 encodes 16S rRNA
agagtttgatcatggctcaggatgaacgctggcggcgtgcttaacacatgcaagtcgaacggactcttatcgacagaagtatttatacggacgttggtaggcgttagtggcggacgggtgagtaacgcgtgggaaacctgccctattccgggggataccagttggaaacgactgttaataccgcataagcgcacattgccgcatggcagagtgtgaaaaactccg

SEQ ID NO: 2781 - DNA, 225 bp, Unknown
  bacterial strain Ascusb_197 encodes 16S rRNA
agagtttgatcatggctcaggacgaacgctggcggcgtgcttaacacatgcaagtcgagcggagacatgtaacggaaggcttcggccggaagatatatgttttagcggcggacgggtgagtaacgcgtgagcaacctgtccttcacagggggataagataccgaaaggtgttctaataccgcataagaccacaacgtcacatggcgaaggggtcaaaggagcaat

SEQ ID NO: 2782 - DNA, 225 bp, Unknown
  bacterial strain Ascusb_2638 encodes 16S rRNA
agagtttgatcatggctcaggatgaacgctagcggcaggcttaacacatgcaagtcgaggggcagcgggttgtagcaatacaatgccggcgaccggcgaaagggtgcgtaacgcgtgaacaatctgcccgtatccgggacataagcgatggaaacgtcgtctaatttcccataacaacgagggccgcatgacccatgtttgaaagattcgtcggatacggatgag

SEQ ID NO: 2783 - DNA, 225 bp, Unknown
  bacterial strain Ascusb_124 encodes 16S rRNA
agagtttgatcctggctcaggatgaacgctagctacaggcttaacacatgcaagtcgaggggcagcatgaaggaagcttgcttcctttgatggcgaccggcgcacgggtgagtaacgcgtatccaacctgcccattacactgggatagcccgccgaaaggcgaattaatcccggatagtgttcttagatggcatcagacaaggactaaaggtaatttccggtaat

SEQ ID NO: 2784 - DNA, 225 bp, Unknown
  bacterial strain Ascusb_3805 encodes 16S rRNA
agagtttgatcatggctcaggatgaacgctagcggcaggcttaacacatgcaagtcgaggggcagcagggagtagcaatactctgctggcgaccggcgcacgggtgcgtaacgcgtatgcaacctaccctgtacagggggataacggagagaaatttccactaatatcccatggagtcactggatcgcatggtccggtgactaaagcttcggtggtacgggatgg

SEQ ID NO: 2785 - DNA, 225 bp, Unknown
  bacterial strain Ascusb_12619 encodes 16S rRNA
agagtttgatcatggctcaggatgaacgctagctacaggcttaacacatgcaagtcgaggggcagcgagagtgtagcaatacacttgtcggcgaccggcgcacgggtgagtaacgcgtatccaacctggcccttagtaggggatagcccggcgaaagtcggattaataccctatgttctcctttgagagcatttgatgaggagcaaagatttatcgctaggggat

SEQ ID NO: 2786 - DNA, 225 bp, Unknown
  bacterial strain Ascusb_3270 encodes 16S rRNA
agagtttgatcctggctcaggatgaacgctggcggcgtgcttaacacatgcaagtcgaacgaagcactttacttgatctcttcggagtgattgttttgtgactgagtggcggacgggtgagtaacgcgtgggtaacctgccttgtacaggggaataacagttggaaacgactgctaataccgcataagcgcacaggaccgcatggtctggtgtgaaaaactccgg

SEQ ID NO: 2787 - DNA, 225 bp, Unknown
  bacterial strain Ascusb_653 encodes 16S rRNA
agagtttgatcatggctcagaacgaacgctggtggcgtgtcttatacatgcaagtcgagcggtgcagcaatgcatagcggcgaacgggtgagtaacacgtaagcaatctgccccctgcttgggaatagccgtgccaacgcgcggataataccgaatatcgtggccttccgcatgggaggttgacaaaagatttatcggcaggggatgagcttgcgtccgattagc

SEQ ID NO: 2788 - DNA, 225 bp, Unknown
  bacterial strain Ascusb_9544 encodes 16S rRNA
agagtttgatcatggctcaggatgaacgctggcggcatgcctaagacatgcaagtcgtacgagagggcccatgaagttgattgaaaacggagtgcttgcacaaagtcggattttaatggattggattttccctcgagtggcaaacgggtgagtaacacgtgggttacctacctctaagactgggataccaattggaaacgattgttaaaaccggatgtgctctac

SEQ ID NO: 2789 - DNA, 225 bp, Unknown
  bacterial strain Ascusb_1572 encodes 16S rRNA
agagtttgatcatggctcaggacgaacgctggcggcgtgcctaacacatgcaagtcgaacgagcgcacgggagcttgctcctgtgctgcgagtggcggacgggtgagtaacgcgtgaggaacctgcccttcagagggggataacgtcgggaaactgacgctaataccgcataacgtgtctgatccgcatggatcggataccaaaggagcaatccgctgaaggatg

SEQ ID NO: 2790 - DNA, 225 bp, Unknown
  bacterial strain Ascusb_4760 encodes 16S rRNA
agagtttgatcctggctcaggatgaacgctagcggcaggcttaacacatgcaagtcgaggggcagcggggtgtagcaatacactgccggcgaccggcgcacgggtgcgtaacgcgtatgcaacctgccccgcacagggggataacggagagaaatttccactaatatcccatggcgtattgaggccgcatggtcttgatactaaagcttcggtggtgcgggatgg

SEQ ID NO: 2791 - DNA, 225 bp, Unknown
  bacterial strain Ascusb_2631 encodes 16S rRNA
agagtttgatcatggctcaggatgaacgctggcggcgtgcctaacacatgcaagtcgaacgaagcatcttgcccgaggaagaggagtgcttgcacaaatcggactcaactgagatgacttagtggcggacgggtgagtaacgcgtgggtaacctgccttatacagggggataacagttagaaatgactgctaataccgcataagcgcacagcaccgcatggtgca

SEQ ID NO: 2792 - DNA, 225 bp, Unknown
  bacterial strain Ascusb_2485 encodes 16S rRNA
agagtttgatcatggctcaggatgaatgctggcggcgtgcctaatacatgcaagtcgagcggtaacagggcttcaccgtttccttgacactccgggctagatgcgggaggttgatttcgagggaacagtgaagctgctgacgagcggcggacggctgagtaacgcgtgggaacggaccccaaactgagggataactagtcgaaagattagctaataccgcatgtg

SEQ ID NO: 2793 - DNA, 225 bp, Unknown
  bacterial strain Ascusb_873 encodes 16S rRNA
agagtttgatcatggctcaggatgaacgctggcggcgtgcttaacacatgcaagtcgaacgggcttaaatcggaagcttgcttctgatttaagttagtggcggacgggtgagtaacgcgtgggtaacctaccctgtgcagggggatagcagctggaaacggctgataaaaccgcataacacggtagcaccgcatggtgcagccgtcaaatatttataggcacagg

SEQ ID NO: 2794 - DNA, 225 bp, Unknown
  bacterial strain Ascusb_1747 encodes 16S rRNA
agagtttgatcatggctcaggatgaacgctggcggcgtgcttaacacatgcaagtcgaacggagattacttttaagcttgcttagttgtaatcttagtggcggacgggtgagtaacgcgtgggcaacctgccttataccgggggacaacagctggaaacggctgctaataccgcataagcgcacagtatcgcatgatacagtgtgaaaaactccggtggtataag

SEQ ID NO: 2795 - DNA, 225 bp, Unknown
  bacterial strain Ascusb_1499 encodes 16S rRNA
agagtttgatcatggctcaggatgaacgctagctacaggcttaacacatgcaagtcgcggggcagcgtggggatggcttgccatctctgacggcgaccggcgcacgggtgagtaacgcgtatccaacctgccccttaccacgggatagccctccgaaagggggattaataccgtatgtggccacgagacggcatccgaccgtggctaaaggctcagcggtaaggg

SEQ ID NO: 2796 - DNA, 225 bp, Unknown
  bacterial strain Ascusb_92 encodes 16S rRNA
agagtttgatcatggctcaggatgaacgctggcggcgtgcttaacacatgcaagtcgaacggagaactgcccttcgggacggttcttagtggcggacgggtgagtaacgcgtgaggaacctgccttggagtggggaataacggctggaaacggccgctaataccgcataatgcagttgggtcgcatggctctgactgccaaagatttattgctctgagatggcct

SEQ ID NO: 2797 - DNA, 225 bp, Unknown
  bacterial strain Ascusb_15117 encodes 16S rRNA
agagtttgatcctggctcaggatgaacgctagctacaggcttaacacatgcaagtcgaggggcatcgggagagtagcttgctattcttgccggcgaccggcgcacgggtgagtaacgcgtatccaacctaccccatacaagaggatagcccggcgaaagtcggattaatactctatgtagtacgatgaaggcatctgagttgtatgaaaggttattccggtatgg

SEQ ID NO: 2798 - DNA, 225 bp, Unknown
  bacterial strain Ascusb_4387 encodes 16S rRNA
agagtttgatcctggctcaggacgaacgctggcggcgtgcttaacacatgcaagtcgaacggagttagacgctggattgatgccagcttgctggtggatttccttgtctagcttagtggcggacgggtgagtaacgcgtgagtaacctgccctcgagtggggaataacgttctgaaaagatcgctaataccgcataacacatactgatcgcatggtcggtatgtc

SEQ ID NO: 2799 - DNA, 225 bp, Unknown
  bacterial strain Ascusb_4311 encodes 16S rRNA
agagtttgatcatggctcaggatgaacgctagctacaggcttaacacatgcaagtcgaggggcagcatgatctgtgcttgcacagattgatggcgaccggcgcacgggtgagtaacgcgtatccaaccttccccttagtagggcatagcccggcgaaagtcggattaataccctatgttttccaatgaggacatctgagctggaataaagattcatcgctaaggg

SEQ ID NO: 2800 - DNA, 225 bp, Unknown
  bacterial strain Ascusb_2113 encodes 16S rRNA
agagtttgatcatggctcaggatgaacgctagctacaggcttaacacatgcaagtcgaggggcagcgagaagaaagcttgctttctttgtcggcgaccggcgcacgggtgagtaacgcgtatccaaccttccccttagtagggcatagcccggcgaaagtcggattaataccctatgttgtttgaagcggacatctaattcaaaccaaagattcatcgctaaggg

SEQ ID NO: 2801 - DNA, 225 bp, Unknown
  bacterial strain Ascusb_626 encodes 16S rRNA
agagtttgatcatggctcaggatgaacgctggcggcgtgcctaacacatgcaagtcgaacggggttaaagagaaattttcggatggacctttaacttagtggcggacgggtgagtaacgcgtggataacctgcctcgcacagggggatagcagctggaaacggctggtaataccgcataagaccacggccctgcatggggctgaggtaaaagatttatcggtgcg

SEQ ID NO: 2802 - DNA, 225 bp, Unknown
  bacterial strain Ascusb_4195 encodes 16S rRNA
agagtttgatcctggctcaggatgaacgctggcggcgtgcctaacacatgcaagtcgaacggagatttaacgctgatgaggcttcggcggaatcttgttaaatcttagtggcggacgggtgagtaacgcgtgggcaacctgcctcgtactgggggataacagttggaaacgactgttaataccgcataagcgcacggtatcgcatgatacagtgtgaaaaactcc

SEQ ID NO: 2803 - DNA, 225 bp, Unknown
  bacterial strain Ascusb_3401 encodes 16S rRNA
agagtttgatcatggctcaggatgaacgctggcggcgtgcctaatacatgcaagtcgagcgagaatcagatgaactgagattcgtcaacggaattctgaggaaagcggcggacgggtgagtaacgcgtaggcaacctgcccttagcagagggatagccattggaaacgatgattaaaacctcataatgctgttttgacacatgtcttgacagccaaagatttatc

SEQ ID NO: 2804 - DNA, 225 bp, Unknown
  bacterial strain Ascusb_2551 encodes 16S rRNA
agagtttgatcctggctcaggatgaacgctggcggcgtgcttaacacatgcaagtcgaacgaagcacttacgacagaagccttcgggtggaagatgtttgtgactgagtggcggacgggtgagtaacgcgtgggaaacctgccctatgcagggggataacagtcggaaacgactgctaataccgcataagcgcacagcatcgcatggtgcagtgtgaaaagcctt

SEQ ID NO: 2805 - DNA, 225 bp, Unknown
  bacterial strain Ascusb_7916 encodes 16S rRNA
agagtttgatcatggctcaggatgaacgctggcggcgtgcttaacacatgcaagtcgaacgaagcatttatttcggatctttcgggagaagagatttatgactgagtggcggacgggtgagtaacgcgtggggaacctgccccataccgggggacaacagttggaaacgactgctaataccgcataagcgcacagggctgcatggcccggtgtgaaaaactccgg

SEQ ID NO: 2806 - DNA, 225 bp, Unknown
  bacterial strain Ascusb_2582 encodes 16S rRNA
agagtttgatcctggctcaggatgaacgctagcggcaggcttaacacatgcaagtcgaggggtaacagggagtagcaatactctgctgacgaccggcgcacgggtgcgtaacgcgtatgcaacctacctgtaacagggggataacggagagaaatttccactaataccccatattgttgtggattcgcatgttttcacaacgaaagcttcggtggttacggatgg

SEQ ID NO: 2807 - DNA, 225 bp, Unknown
  bacterial strain Ascusb_1696 encodes 16S rRNA
agagtttgatcatggctcaggatgaacgctggcggcgtgcttaacacatgcaagtcgaacgaagcagtggacttcggtttacagcttagtggcggacgggtgagtaacgcgtgggcaacctgccttacaccgggggataacagttggaaacgactgctaataccgcataagaccacggtaccgcatggtacaggggtaaaagttccggcgatgtaagatggaccc

SEQ ID NO: 2808 - DNA, 225 bp, Unknown
  bacterial strain Ascusb_3722 encodes 16S rRNA
agagtttgatcatggctcaggatgaacgctagcggcaggcttaacacatgcaagtcgaggggtaacagggagtagcaatactctgctgacgaccggcgcacgggtgcgtaacgcgtatgcaacctacctgtaacagggggataacggagggaaacttccactaataccccatattgttgtggattcgcatgttttcacaacgaaagcttcggtggttacggatgg

SEQ ID NO: 2809 - DNA, 225 bp, Unknown
  bacterial strain Ascusb_5711 encodes 16S rRNA
agagtttgatcctggctcaggatgaacgctagcgacaggcctaacacatgcaagtcgaggggcagcgcgggagaagcttgcttttcctggcggcgaccggcgcacgggtgagtaacgcgtatgcaacctgccagtaagcgcgggatagccttccgaaagggagattaacaccgcatgaggccgcggatgggcatccatctgcggtgaaatgagaagcttactgat

SEQ ID NO: 2810 - DNA, 225 bp, Unknown
  bacterial strain Ascusb_864 encodes 16S rRNA
agagtttgatcctggctcaggatgaacgctggcggcgtgcttaacacatgcaagtcgaacggagtatttcgcccgagacctgaggtagcttgctacggatggaatcaattgaaatacttagtggcggacgggtgagtaacgcgtgagtaacctgccctttagtggggaataacaccgagaaatcggtgctaataccgcataatgtcagaggaccgcatgatcttc

SEQ ID NO: 2811 - DNA, 225 bp, Unknown
  bacterial strain Ascusb_4048 encodes 16S rRNA
agagtttgatcctggctcaggatgaacgctagctacaggcttaacacatgcaagtcgaggggcagcatggtcttagcttgctaagactgatggcgaccggcgcacgggtgagtaacgcgtatccaacctggcccttagtaggggatagcccggcgaaagtcggattaataccctatgttcttcgtagaggacatctgaaatgaagcaaagattaatcgctaaggg

SEQ ID NO: 2812 - DNA, 225 bp, Unknown
  bacterial strain Ascusb_8561 encodes 16S rRNA
agagtttgatcatggctcaggatgaacgctagctacaggcttaacacatgcaagtcgaggggcagcatggtggtagcttgctaccaccgatggcgaccggcgcacgggtgagtaacacgtatccaacctgcccatgacccggggatagccctctgaaaggaggattaatacccgatacggtgcgagtgggacatcccgctcttaccaaagattcatcggtcacgg

SEQ ID NO: 2813 - DNA, 225 bp, Unknown
  bacterial strain Ascusb_532 encodes 16S rRNA
agagtttgatcatggctcaggatgaacgctggcggcgtgcttaacacatgcaagtcgaacgaagcacttgaacctgatttcttcggattgaaggatcttgtgacttagtggcggacgggtgagtaacgcgtgggcaacctgcctcacactgggggacaacagttggaaacgactgctaataccgcataagcgcacactgctgcatggcagagtgtgaaaaactga

SEQ ID NO: 2814 - DNA, 225 bp, Unknown
  bacterial strain Ascusb_718 encodes 16S rRNA
agagtttgatcctggctcagaacgaacgctggcggcgcgttttaagcatgcaagtcgggcggcaaggtccttcgggaccctagagcggcggacgggtgagtaacacgtggacaatctgccctgcagtctggaatagcctatggaaacatgggataatgccggatgcgacgcgttggcgcaggccgatgcgggaaagttcccacgggaacgctgcaggatgagtcc

SEQ ID NO: 2815 - DNA, 225 bp, Unknown
  bacterial strain Ascusb_7172 encodes 16S rRNA
agagtttgatcatggctcaggatgaacgctagctacaggcttaacacatgcaagtcgaggggcagcatgtcgtgtgcttgcacacgatgatggcgaccggcgcacgggtgcgtaacgcgtatccaaccttcccgcaagccggggatagcccggcgaaagtcggattaatacccgatgtggtgctttgaggacatctgactggcactaaaggcttgccgcttgcgg

SEQ ID NO: 2816 - DNA, 225 bp, Unknown
  bacterial strain Ascusb_1425 encodes 16S rRNA
agagtttgatcatggctcaggacgaacgctggcggcacgcttaacacatgcaagtcgaacggagttttgatcagcttgctgaacaaaacttagtggcggacgggtgagtaacacgtgagcaacctgcctttgagagcggaatagcttctggaaacggatggtaataccgcataacattattgaatcgcatggtttaataatcaaagatttatcgctcaaagatgg

SEQ ID NO: 2817 - DNA, 225 bp, Unknown
  bacterial strain Ascusb_5492 encodes 16S rRNA
agagtttgatcatggctcagaacgaacgctggcggcgcgtcttaagcatgcaagtcgagcggtaagttggaagcttgcttctaacctagagcggcggactggtgagtaacgcgtgggtgacgtaccttcgtgacggggacagctcctagaaataggagataataccggatacgctgtgtgttgtcagaggacacacaggaaaggatcttttgattcgcacgaaga

SEQ ID NO: 2818 - DNA, 225 bp, Unknown
  bacterial strain Ascusb_8863 encodes 16S rRNA
agagtttgatcctggctcaggattaacgctggcggcatgcctaatacatgcaagtcgaatggaagagcttgcttttccatggcgaacgggtgagtaacacgtaggtaacctaccttaaggacgaggataacctttggaaacgaaggataatactggataggacatcaaaaagcacatgcttagatgtttaaaggagcaatccaccataagaggggcctgcggcgc

SEQ ID NO: 2819 - DNA, 225 bp, Unknown
  bacterial strain Ascusb_4511 encodes 16S rRNA
agagtttgatcatggctcaggatgaacgctggcggcgtgcttaacacatgcaagtcgaacgaagcgtcccgcccgatgaagtggagtgcttgcacaaagcagaatcaattgggatgacttagtggcggacgggtgagtaacgcgtgggtaacctgccttacacagggggacaacagttggaaacgactgctaataccgcataacccgctagtatcgcatgataca

SEQ ID NO: 2820 - DNA, 225 bp, Unknown
  bacterial strain Ascusb_324 encodes 16S rRNA
agagtttgatcatggctcaggatgaacgctggcggcgtgcttaatacatgcaagtcgaacgaagacttctcgctgaattgaattcattcttttcttgagatgtcttagtggcggacgggtgagtaacgcgtgggtaacctgccttacacagggggataacagttagaaatgactgctaataccgcataagcgcacagtatcgcatgatacagtgtgaaaaactcc

SEQ ID NO: 2821 - DNA, 225 bp, Unknown
  bacterial strain Ascusb_9394 encodes 16S rRNA
agagtttgatcctggctcaggatgaacgctggcggcgtgcttaacacatgcaagtcgaacgggatatactttttagcttgctaagttgtatatctagtggcggacgggtgagtaacgcgtgggtaacctgccgtatgccgggggacaacagttggaaacgactgctaataccgcataagcgcacagtaccgcatggtacggtgtgaaaaactccggtggcatacg

SEQ ID NO: 2822 - DNA, 225 bp, Unknown
  bacterial strain Ascusb_514 encodes 16S rRNA
agagtttgatcatggctcaggacgaacgctggcggcgtgcctaacacatgcaagtcgagcggagacatttggaaagcttgctttttggatgtttcagcggcggacgggtgagtaacgcgtgagcaacctgcctttaacagggggataacgcatcgaaagatgtgctaataccgcataagaccacaacgctacatggcgaaggggtcaaaggagcaatccggttaa

SEQ ID NO: 2823 - DNA, 225 bp, Unknown
  bacterial strain Ascusb_113 encodes 16S rRNA
agagtttgatcatggctcaggacgaacgctggcggcacgcttaacacatgcaagtcgaacggagttatttggagcttgctctggataacttagtggcggacgggtgagtaacacgtgagcaacctgccttcaagagcggaatagcttctggaaacggatggtaataccgcataacattacgggaccgcatgattctgtaatcaaagatttatcgcttgaagatgg

SEQ ID NO: 2824 - DNA, 225 bp, Unknown
  bacterial strain Ascusb_2697 encodes 16S rRNA
agagtttgatcctggctcaggatgaacgctggcggcgtgcctaatacatgcaagtcgagcgagaatcgaatgaacggagattcgtcgaagtgatttcgaggaaagcggcggacgggtgagtaacgcgtaggcaacctgcccttagcagagggatagccattggaaacgatgattaaaacctcataatgctgtagaaacacatgttactgcagccaaagatttatc

SEQ ID NO: 2825 - DNA, 225 bp, Unknown
  bacterial strain Ascusb_3282 encodes 16S rRNA
agagtttgatcctggctcaggatgaacgctagctacaggcttaacacatgcaagtcgaggggcagcaggaatctagcttgctagatttgctggcgaccggcgcacgggtgagtaacgcgtatccaaccttccccttagtagggcatagcccgtagaaatgcggattaataccctatgttttccgatgcagacatctaatttggaataaaggtttaccgctaaggg

SEQ ID NO: 2826 - DNA, 225 bp, Unknown
  bacterial strain Ascusb_4173 encodes 16S rRNA
agagtttgatcatggctcaggatgaacgctagctacaggcttaacacatgcaagtcgaggggtaacattggcggagcttgctcagccagatgacgaccggcgcacgggtgagtaacgcgtatccaacctgcccattggtcagggataacctcccgaaagggagcctaatacctgatgttgtgagaagaaggcctctgattttcacgaaagacttcggtcgccgat

SEQ ID NO: 2827 - DNA, 225 bp, Unknown
  bacterial strain Ascusb_332 encodes 16S rRNA
agagtttgatcatggctcaggatgaacgctggcggcgtgcttaatacatgcaagtcgaacgaagatatttcgctgatgcgattcgtcaaatcttgaaatatcttagtggcggacgggtgagtaacgcgtgggtaacctgccttacacagggggataacagttagaaatgactgctaataccgcataagcgcacgagatcgcatgatcatgtgtgaaaagatttat

SEQ ID NO: 2828 - DNA, 225 bp, Unknown
  bacterial strain Ascusb_4597 encodes 16S rRNA
agagtttgatcctggctcaggatgaacgctagcgacaggcttaacacatgcaagtcgaggggcagcatgggaggtggcaacaccacccgatggcgaccggcgcactggtgagtaacacgtatgcaacctgccccccacaggggaataaaccagagaaatttggcctaatgccccgtagtccccgcgcccgcatggccgcggggggaaagatccgtcggtggggga

SEQ ID NO: 2829 - DNA, 225 bp, Unknown
  bacterial strain Ascusb_7297 encodes 16S rRNA
agagtttgatcatggctcaggatgaacgctggcggcgtgcctaacacatgcaagtcgaacggtgatatatagatgatttcggtctgaagtatatcatagtggcggacgggtgagtaacgcgtggataacctgccccgtactgggggatagcagctggaaacggctggtaataccgcataagcgcacgagggggcctcccctagtgtgaaaagattcatcggtacg

SEQ ID NO: 2830 - DNA, 225 bp, Unknown
  bacterial strain Ascusb_168 encodes 16S rRNA
agagtttgatcatggctcaggatgaacgctagctacaggcttaacacatgcaagtcgaggggcagcattagattagcttgctaatttagatggcgaccggcgcacgggtgagtaacgcgtatccaaccttccccctgctcagggatagcccggtgaaaaccggattaagacctgatagtttcactagatggcatctgacggtgaataaaggtttcggcaagggat

SEQ ID NO: 2831 - DNA, 225 bp, Unknown
  bacterial strain Ascusb_2426 encodes 16S rRNA
agagtttgatcatggctcaggatgaacgctagcggcaggcttaacacatgcaagtcgaggggcagcaggcggtagcaataccgtgctggcgaccggcgcacgggtgcgtaacgcgtatgcaacctacccactacagggggataacggagggaaacttccactaatatcccatggtgtcatcggatcgcatggtctggtgactaaagctacggtggtagtggatgg

SEQ ID NO: 2832 - DNA, 225 bp, Unknown
  bacterial strain Ascusb_917 encodes 16S rRNA
agagtttgatcctggctcaggatgaacgctggcggcgtgcttaatacatgcaagtcgaacggatgaaggaagaaagcttgctttcttcccgattcagtggcgaacgggtgagtaatacgtaggcaacctgccccaaagcgggggatagcagttggaaacgactattaataccgcataggtaatagggaggcatctccttattattaaaggtgcgtttgcaccgct

SEQ ID NO: 2833 - DNA, 225 bp, Unknown
  bacterial strain Ascusb_1920 encodes 16S rRNA
agagtttgatcatggctcaggatgaacgctggcggcgtgcttaacacatgcaagtcgaacggagtttagatgaagcttgcgattctaaacttagtggcggacgggtgagtaacgcgtgggtaacctgccttataccgggggataacacttagaaataggtgctaataccgcataagcgcacagtcctgcatgggacagtgtgaaaaactccggtggtataagatg

SEQ ID NO: 2834 - DNA, 225 bp, Unknown
  bacterial strain Ascusb_3105 encodes 16S rRNA
agagtttgatcatggctcaggacgaacgctggcggcgtgcctaacacatgcaagtcgaacggagtttgaggaatgaaggtttcgattggattttcttaaacttagtggcggacgggtgagtaacgcgtgagtaacctgcccataagagggggataacgttttgaaaagaacgctaataccgcataacatatcgaagccgcatggcattgatatcaaaggagcaat

SEQ ID NO: 2835 - DNA, 225 bp, Unknown; identical to SEQ ID NO: 2317
  bacterial strain Ascusb_402 encodes 16S rRNA

SEQ ID NO: 2836 - DNA, 225 bp, Unknown
  bacterial strain Ascusb_6906 encodes 16S rRNA
agagtttgatcatggctcaggatgaacgctagctacaggcttaacacatgcaagtcgaggggcagcatggtggtagcttgctaccactgatggcgaccggcgcacgggtgagtaacacgtatccaacctgccttcagctcggggatagccctctgaaaggaggattaatacccgatgtgtttgcagtccggcatcggactgcaatcaaagatttatcggctgttg

SEQ ID NO: 2837 - DNA, 225 bp, Unknown
  bacterial strain Ascusb_5319 encodes 16S rRNA
agagtttgatcatggctcaggatgaatgctggcggcgtgcctaatacatgcaagtcgagcggtaacagggcttcaccgtgttcttgacacacctagcgcagagtcgtaggttgttgacttcgagagcacagtgaagctgctgacgagcggcggacggctgagtaacgcgtgggaacggaccccaaactgagggataacgcaccgaaaggtgtgctaataccgcat

SEQ ID NO: 2838 - DNA, 225 bp, Unknown
  bacterial strain Ascusb_3781 encodes 16S rRNA
agagtttgatcctggctcaggatgaacgctagcgacaggcttaacacatgcaagtcgaggggcagcgcggaggtggcaacacttctggcggcgaccggcgcactggtgagtaacacgtatgcgacctgccccggacagggggataaacccgggaaactgggcctaataccccatacgccgatgggatgcatgtcctttcggtgaaagatccgtcggtccgggatg

SEQ ID NO: 2839 - DNA, 225 bp, Unknown
  bacterial strain Ascusb_1589 encodes 16S rRNA
agagtttgatcatggctcaggatgaacgctagcggcaggcttaacacatgcaagtcgaggggcagcgcggggtagcaatactctggcggcgaccggcggaagggtgcgtaacgcgtgagcaacatgcccgtatgagggggataagcgctggaaacggcgtctaataccccgtaacactggagatcgcatggttttcagttaaaagatttatcgcatacggattgg

SEQ ID NO: 2840 - DNA, 225 bp, Unknown
  bacterial strain Ascusb_16249 encodes 16S rRNA
agagtttgatcctggctcaggatgaacgctggcggcatgcctaagacatgcaagtcgaacgaggcgaccttaagaagactgagtgcttgcacaaagttggaagaagatcatcgcctagtggcagacgggtgagtaacacgtgggttacctaccttcaagttggggataacagttggaaacgattgctaataccgaataagatgtacttgtacattgaaagaagcc

SEQ ID NO: 2841 - DNA, 225 bp, Unknown
  bacterial strain Ascusb_3696 encodes 16S rRNA
agagtttgatcatggctcaggacgaacgctggcggcacgcttaacacatgcaagtcgaacggagtattttggagcttgctttgaaatacttagtggcggacgggtgagtaacacgtgagcaacctgcctttgagagcggaatagcttctggaaacggatggtaataccgcatgacattacagtaccgcatggtacagtaatcaaagatttatcgctcaaagatgg

SEQ ID NO: 2842 - DNA, 225 bp, Unknown
  bacterial strain Ascusb_13100 encodes 16S rRNA
agagtttgatcatggctcaggacgaacgctggcggcgtgcttaacacatgcaagtcgaacgaggttatgtgaaggaaggtttcggctggaatttatataatcgagtggcggacgggtgagtaacgcgtgaggaacctgtcttctacagggggataacggtccgaaaggattgctaataccgcataagaccacgaagtcgcatggctttgaggtcaaaggagaaat

SEQ ID NO: 2843 - DNA, 225 bp, Unknown
  bacterial strain Ascusb_831 encodes 16S rRNA
agagtttgatcatggctcagagtgaacgctggcggcgtggctcagacatgcaagtcgagcgagaatatgccttcgggtataggaaagcggcaaacgggtgagtaatacgtaagtaatctgcctctaaaacgggaatagcttggtgaaaactgaggtaatgcccgataccaacttgtttcgcatgaaacaagtttgaaaggtttgtaatgacgtttagagaggagc

SEQ ID NO: 2844 - DNA, 225 bp, Unknown
  bacterial strain Ascusb_9689 encodes 16S rRNA
agagtttgatcatggctcaggacgaacgctggcggcgtgcctaacacatgcaagtcgaacggggtatgattcttcggagtcatacttagtggcgaacgggtgagtaacgcgtgagcaacctgcctttttgagggggataacaaccggaaacggttgctaataccgcataagaccacactgtcgcatgacagaggggtcaaaggagcaatccgcagaaagaggggc

SEQ ID NO: 2845 - DNA, 225 bp, Unknown
  bacterial strain Ascusb_3313 encodes 16S rRNA
agagtttgatcatggctcaggataaacgctggcggcgcacataagacatgcaagtcgaacggaagtcgttatattgattttgaagagaacggagaacttgttcaaagggacatgatgaagatatataacaatggctttagtggcggactggtgagtaatacgtaagcaacctgcctatcagaggggaacaacagttagaaatgactgctaataccgcatatgcca

SEQ ID NO: 2846 - DNA, 225 bp, Unknown
  bacterial strain Ascusb_2294 encodes 16S rRNA
agagtttgatcatggctcaggatgaacgctggcggcgtgcctaatacatgcaagtcgagcgagaatctgacgatcggagattcgtcaaagagaatcagaggaaagcggcggacgggtgagtaacgcgtaggcaacctgcccttagcagagggatagccattggaaacgatgattaaaacctcataaagctgtgagcacacatgtacacacagccaaagatttatc

SEQ ID NO: 2847 - DNA, 225 bp, Unknown
  bacterial strain Ascusb_1547 encodes 16S rRNA
agagtttgatcctggctcaggatgaacgctggcggcgtgcctaacacatgcaagtcgaacggagtgcagacgctgaagatcaaagtagcttgctatagagagattcttgtttgtacttagtggcggacgggtgagtaacgcgtggaaaacctgcctcatacagggggataacaggaagaaattcctgctaataccgcatgagcgcacactgtcgcatggcagagt

SEQ ID NO: 2848 - DNA, 225 bp, Unknown
  bacterial strain Ascusb_1179 encodes 16S rRNA
agagtttgatcctggctcagaacgaacgctggtggcgtgtcttatacatgcaagtcgagcggggcagcaatgcccagcggcgaacgggtgagtaacgcgtaagcaatctgccccatatcaggaaatacccgtgccaacgcgcggttaatgtccaggagcgtggccttccgcatgggaggttgacaagagatttatcggtatgggatgagcttgcgtccgattagc

SEQ ID NO: 2849 - DNA, 225 bp, Unknown
  bacterial strain Ascusb_611 encodes 16S rRNA
agagtttgatcatggctcagaacgaacgctggcggcacgcttaacacatgcaagtcggacggagtgtaagggcttgctcttacacttagtggcggacgggtgagtaacacgtgggaacatatcctgtagtggtggatagctctgggaaactggaggtaatacagcataagctcgagagaggaaagagagattgctataggggtggcccgcggctgattaggtagt

SEQ ID NO: 2850 - DNA, 225 bp, Unknown
  bacterial strain Ascusb_943 encodes 16S rRNA
agagtttgatcatggctcaggatgaacgctagctacaggcttaacacatgcaagtcgaggggcagcatgatcttagcttgctaaggttgatggcgaccggcgcacgggtgagtaacgcgtatccaacctggcccacagtagggaatagcccggcgaaagtcggattaatgccctatgttctccttcgagagcatttgaggaggagcaaagattcatcgctatggg

SEQ ID NO: 2851 - DNA, 225 bp, Unknown
  bacterial strain Ascusb_7806 encodes 16S rRNA
agagtttgatcatggctcaggatgaacgctggcggcatgcctaagacatgcaagtcgaacgagacgacctcaagaagactgagtgcttgcacgaagttggaaagagatcatcgtctagtggcagacgggtgagtaacacgtgggtaacctacctttaagttggggataacagttggaaacgattgctaataccgaataagatgtacttgtacattgaaagaagcc

SEQ ID NO: 2852 - DNA, 225 bp, Unknown
  bacterial strain Ascusb_668 encodes 16S rRNA
agagtttgatcatggctcaggatgaacgctagcgacaggcctaacacatgcaagtcgaggggcagcgcgggagaagcttgcttttcctggcggcgaccggcgcacgggtgcgtaacaggtgtgcaatctgtccatagtcgggggatagcccagcgaaagctgaattaacactccatgtgaatcgaagccgcatgactttgatttgaaacgcaaggactatgggtg

SEQ ID NO: 2853 - DNA, 225 bp, Unknown
  bacterial strain Ascusb_1665 encodes 16S rRNA
agagtttgatcatggctcaggatgaacgctagcggcaggcttaacacatgcaagtcgaggggcagcgcggggtagcaataccctggcggcgaccggcgcacgggtgcgtaacgcgtatgcaacctgccccgcacagggggataacggagggaaacttccactaatatcccatggtgttcccgggccgcatggtctggggactaaagcttcggtggtgcgggatgg

SEQ ID NO: 2854 - DNA, 225 bp, Unknown
  bacterial strain Ascusb_1892 encodes 16S rRNA
agagtttgatcatggctcaggacgaacgctggcggcgtgcctaacacatgcaagtcgaacggagttgacttgaatgagattttcggattgagttcggttaacttagtggcggacgggtgagtaacgcgtgagtaacctgcccacaagagggggataacgtcttgaaaaagacgctaataccgcataacatatcgaagccgcatgactttgatatcaaaggaggaa

SEQ ID NO: 2855 - DNA, 225 bp, Unknown
  bacterial strain Ascusb_2612 encodes 16S rRNA
agagtttgatcatggctcaggattaacgctggcggcgtgcctaatacatgcaagtcgaatggtagcaataccatggcgaacgggtgagtaacacgtaggtaacctgtctttaagacgaggataaccgatggaaacgtcggataatactcgataggtgatatgagggcatccttgaatcattaaagatttatcacttagagaggggcctgcggcgcattagctaga

SEQ ID NO: 2856 - DNA, 225 bp, Unknown
  bacterial strain Ascusb_4129 encodes 16S rRNA
agagtttgatcctggctcaggacgaacgctggcggcgtgcttaacacatgcaagtcgaacggggattattggaatgagagcttcggcaggatttctggtaattctagtggcggacgggtgagtaacgcgtgagcaacctgtcccagacagggggataacacttggaaacaggtgctaataccgcataagaccacagcatcacatggtgcaggggtaaaaggtgga

SEQ ID NO: 2857 - DNA, 225 bp, Unknown
  bacterial strain Ascusb_3794 encodes 16S rRNA
agagtttgatcctggctcaggacgaacgctggcggcgtgcttaacacatgcaagtcgaacgaagcttgaagaatgaattcttcggaatgaattctgatatgactgagtggcggacgggtgagtaacgcgtgagcaacctgcccttcggagggggatagtgtctggaaacggacagtaataccgcataacgttaggatatggcatcataagctaaccaaagattta

SEQ ID NO: 2858 - DNA, 225 bp, Unknown; identical to SEQ ID NO: 2584
  bacterial strain Ascusb_3228 encodes 16S rRNA

SEQ ID NO: 2859 - DNA, 225 bp, Unknown
  bacterial strain Ascusb_16972 encodes 16S rRNA
agagtttgatcctggctcaggatgaacgctggcggcatgcctaagacatgcaagtcgaacgaggtggcccacagattgatattgaaaatggagtgcttgcacaaagtcggatttatcatgatgtggatcttccacctagtggcaaacgggtgagtaacacatgggttacctacctctaagttggggataacagttggaaacgattgctaataccgaatatgatct

SEQ ID NO: 2860 - DNA, 225 bp, Unknown
  bacterial strain Ascusb_3998 encodes 16S rRNA
agagtttgatcctggctcaggatgaacgctggcggcgcgcctaacacatgcaagtcgaacggttaaagcacctccgggtgtgaataaagtggcgaacggctgagtaacacgtgggcaacctgcccctcgctccgggacagcctcgggaaactgggagtaataccggatactccgccacccccgcatgggggaggcgggaaagctccgacggcgagggatgggccc

SEQ ID NO: 2861 - DNA, 225 bp, Unknown
  bacterial strain Ascusb_2741 encodes 16S rRNA
agagtttgatcatggctcaggacgaacgctggcggcgtgcctaacacatgcaagtcgagcggggacttaccgaatgaaagcttcggccggattttgataagttctagcggcggacgggtgagtaacgcgtgagcaatctgtctcagacagggggataacgcagcgaaagttgcactaataccgcatgagaccacagagccacatggcttaggggtcaaaggagca

SEQ ID NO: 2862 - DNA, 225 bp, Unknown
  bacterial strain Ascusb_2808 encodes 16S rRNA
agagtttgatcatggctcaggatgaacgctggcggcacgcttaacacatgcaagtcgagcggagtttaaggcttcggttttaaacttagcggcggacgggtgagtaacacgtgggtaacctaccctatacagggggataacgtatagaaatgtacgctaataccgcataagccaacagggaggcatcttccggttggaaaagccgagacggtataggatgggccc

SEQ ID NO: 2863 - DNA, 225 bp, Unknown
  bacterial strain Ascusb_445 encodes 16S rRNA
agagtttgatcatggctcaggatgaacgctagctacaggcttaacacatgcaagtcgaggggcagcataacgaaagcttgcttttgttgatggcgaccggcgcacgggtgagtaacgcgtatccaaccttccctgtagtagagaatagcccggcgaaagtcggattaatgctctatgttgtatttcgatgacatctgaagaataccaaaggtttaccgctatagg

SEQ ID NO: 2864 - DNA, 225 bp, Unknown
  bacterial strain Ascusb_262 encodes 16S rRNA
agagtttgatcatggctcaggacgaacgctggcggcatgcctaacacatgcaagtcgaacggagcttaagaagcttgctttttaagcttagtggcggacgggtgagtaacgcgtgagcaacctgcctttcagtggggaataatactctgaaaagagtactaataccgcatgacgtacagataccgcatggtaactgtaccaaagatttatcgctgagagatgggc

SEQ ID NO: 2865 - DNA, 225 bp, Unknown
  bacterial strain Ascusb_2489 encodes 16S rRNA
agagtttgatcatggctcaggacgaacgctggcggcgtgcctaacacatgcaagtcgaacggagataaggggcttgctccttatcttagtggcggacgggtgagtaacgcgtgagtaacctgcctttcagagggggataaccattggaaacgatggataataccgcataacgtacagttgtcgcatggcagttgtaccaaaggagcaatccgctgaaagatggac

SEQ ID NO: 2866 - DNA, 225 bp, Unknown
  bacterial strain Ascusb_1291 encodes 16S rRNA
agagtttgatcctggctcaggacgaacgctggcggcgtgcttcatacatgcaagtcgaacgagaagttaccttcgggtaatggaaagtggcggacgggtgagtaatgtgtagagaatctgccctagagagggggacaaccgttggaaacgacagctaataccccatatgagcgtaactgaaatgttattcttgaaaactccggtgctctgggatgagtctgcatc

SEQ ID NO: 2867 - DNA, 225 bp, Unknown
  bacterial strain Ascusb_753 encodes 16S rRNA
agagtttgatcatggctcaggatgaacgctagctacaggcttaacacatgcaagtcgaggggcagcataacggaagcttgcttctgttgatggcgaccggcgcacgggtgagtaacgcgtatccaaccttccccttagtagagaatagcccggcgaaagtcggattaatgctctatgttgtattttgaggacatctgacgaataccaaaggttcaccgctaaggg

SEQ ID NO: 2868 - DNA, 225 bp, Unknown
  bacterial strain Ascusb_7519 encodes 16S rRNA
agagtttgatcatggctcaggacgaacgctggcggcgtgcttaacacatgcaagtcgaacgaggttatgttaaggaaggtttcggccggaattgatataaccgagtggcggacgggtgagtaacgcgtgagcaacctgtcttacacagggggataacactccgaaaggagcgctaataccgcataagaccacgatgccacatggcaatggggtaaaaggaggaat

SEQ ID NO: 2869 - DNA, 225 bp, Unknown
  bacterial strain Ascusb_1117 encodes 16S rRNA
agagtttgatcctggctcaggacaaacgctggcggcgtgcctaacacatgcaagtcgaacgagaatcttcggaaagagacttcggtcaatggaaggagaggacagtggcggacgggtgagtaatgcatgagcaacctgccttggagtgggggacaacagttggaaacgactgctaataccgcatgaagttacgggggggcatcctcctgtaaccaaagatttatc

SEQ ID NO: 2870 - DNA, 225 bp, Unknown
  bacterial strain Ascusb_1744 encodes 16S rRNA
agagtttgatcatggctcaggatgaacgctggcggcgtgcctaatacatgcaagtcgaacgagcgaagtccagcttgctggatggagctagtggcgaacgggtgagtaatacgtaagcaacctgcctacacggactgggataacacctggaaacgggcgctaataccggataggtaacggaagggcatccttctgttattaaaggtttgaaacacaagtagatgg

SEQ ID NO: 2871 - DNA, 225 bp, Unknown
  bacterial strain Ascusb_384 encodes 16S rRNA
agagtttgatcatggctcaggatgaacgctggcggcacgcctaacacatgcaagtcgaacggagtttattgaagcttgctttgataaacttagtggcggacgggtgagtaacacgtgagcaacctgcctttcagagagggatagcttctggaaacggatggtaatacctcataacatattgatacggcatcgtattgatatcaaagatttatcgctgaaagatgg

SEQ ID NO: 2872 - DNA, 225 bp, Unknown
  bacterial strain Ascusb_196 encodes 16S rRNA
agagtttgatcatggctcaggatgaacgctggcggcgtgcttaacacatgcaagtcgaacgaagccaaaaggaagcttgctttctttgaagcttagtggcggacgggtgagtaacgcgtgaggaacctgcccttcagtggggaataacagccggaaacgactgctaataccgcataatgtcatcggaccgcatgatctgatgaccaaaggatttattcgctgaag

SEQ ID NO: 2873 - DNA, 225 bp, Unknown
  bacterial strain Ascusb_1544 encodes 16S rRNA
agagtttgatcctggctcaggacgaacgctggcggcgcgcctaacacatgcaagtcgaacggactttatggaaactgaggcttcggcggacgaagaaataaagttagtggcgaacgggtgagtaacacgtgaggaacctacctctcagagggggataacacttagaaataggtgctaataccgcataagaccacgaccgggcatccggatggggtcaaaggagca

SEQ ID NO: 2874 - DNA, 225 bp, Unknown
  bacterial strain Ascusb_1722 encodes 16S rRNA
agagtttgatcatggctcaggatgaacgctggcggcgtgcctaacacatgcaagtcgaacggacctattatttaacagagacttcggttgaagttggttttaggttagtggcggacgggtgagtaacgcgtggagaacctgccctgtactgggggataacagtgagaaatcactgctaataccgcataagcgcacgaaaccgcatggttttgtgtgaaaaactcc

SEQ ID NO: 2875 - DNA, 225 bp, Unknown
  bacterial strain Ascusb_4733 encodes 16S rRNA
agagtttgatcatggctcaggacgaacgctggcggcgtgcttaacacatgcaagtcgaacggggattaggttggaaaggcttcggcccggaagacttaattcgagtggcggacgggtgagtaacgcgtgagcaacctgtcccagacagggggataacacttggaaacaggtgctaataccgcataagaccacggggtcacatggctctggggtaaaaggagcaat

SEQ ID NO: 2876 - DNA, 225 bp, Unknown
  bacterial strain Ascusb_674 encodes 16S rRNA
agagtttgatcatggctcaggacgaacgctggcggcacgcttaacacatgcaagtcgaacggtgaaagtagcttgctactggatcagtggcggacgggtgagtaacacgtgagcaatctgcctctaagtggggaataacgtttggaaacggacggtaataccgcataatatacattgaccgcatgatcggtgtatcaaagatttatcgcttagagatgagctcgc

SEQ ID NO: 2877 - DNA, 225 bp, Unknown
  bacterial strain Ascusb_3712 encodes 16S rRNA
agagtttgatcatggctcaggatgaacgctagctacaggcttaacacatgcaagtcgaggggcagcattgagatagcttgctatttcagatggcgaccggcgcacgggtgagtaacgcgtatccaaccttccctatagtagagaatagcccggcgaaagtcggattaatgctctatgttgttcaatgcggacatctaagttgaaccaaaggtttaccgctatagg

SEQ ID NO: 2878 - DNA, 225 bp, Unknown
  bacterial strain Ascusb_2773 encodes 16S rRNA
agagtttgatcatggctcaggacgaacgctggcggcgtgcctaacacatgcaagtcgaacgaagcacttctggattgagattcgtcaagatccggatttgacttagtggcggacgggtgagtaatacatgagcaacctgccctggagtgggggacaacagttggaaacgactgctaataccgcataatgtatccggaaggcatcttctggataccaaagatttat

SEQ ID NO: 2879 - DNA, 225 bp, Unknown
  bacterial strain Ascusb_1952 encodes 16S rRNA
agagtttgatcatggctcaggatgaacgctggcggcgtgcctaacacatgcaagtcgaacggaaacataacgctactgagatttcggtcaaagtttgttgtgttttagtggcggacgggtgagtaacgcgtggataacctgccatatacagggggataacagttagaaatgactgctaataccgcataagcgcacagtctcgcatgggacagtgtgaaaagccga

SEQ ID NO: 2880 - DNA, 225 bp, Unknown
  bacterial strain Ascusb_2873 encodes 16S rRNA
agagtttgatcatggctcaggatgaacgctagctacaggcttaacacatgcaagtcgaggggcagcatgaagtcagcttgctgactttgatggcgaccggcgcacgggtgcgtaacacgtatccaacctgcccgttactcggggatagcctttcgaaagaaagattaatacccgatggtttcgcatcaccgcatgacggtgcgaataaagattcatcggtaacgg

SEQ ID NO: 2881 - DNA, 225 bp, Unknown
  bacterial strain Ascusb_3988 encodes 16S rRNA
agagtttgatcatggctcaggatgaacgctagcggcaggcttaacacatgcaagtcgaggggcagcgcggggtagcaatactctggcggcgaccggcaaaagggtgcgtaacacgtgagcaacctgcccgtcacagggggataagcgctggaaacggcgtctaataccgcgtaacacattttcccgcatgagaggatgttgaaaatttcgatggtgacggatggg

SEQ ID NO: 2882 - DNA, 225 bp, Unknown
  bacterial strain Ascusb_1006 encodes 16S rRNA
agagtttgatcatggctcaggacgaacgctggcggcacgcctaacacatgcaagtcgaacggtgatttgggagcttgcttccaaatcatagtggcggacgggtgagtaacacgtgagcaacctgcctctgagagagggatagcttctggaaacggatggtaatacctcataacattacatgaccgcatgatcgtgtaatcaaagatttatcactcagagatgggc

SEQ ID NO: 2883 - DNA, 225 bp, Unknown
  bacterial strain Ascusb_490 encodes 16S rRNA
agagtttgatcatggctcaggacgaacgctggcggcacgcttaacacatgcaagtcgaacggagatactgagagcttgcttttggtatcttagtggcggacgggtgagtaacacgtgagcaacctgcctttgagagtggaatagcttctggaaacggatggtaataccgcatgatgttattttatcgcatggtagaataaccaaagatttatcgctcgaagatgg

SEQ ID NO: 2884 - DNA, 225 bp, Unknown
  bacterial strain Ascusb_3329 encodes 16S rRNA
agagtttgatcatggctcaggacgaacgctggcggcgtgcttaacacatgcaagtcgaacggggattagttgattgagagcttcggcaggatatcgattaattcgagtggcggacgggtgagtaacgcgtgagcaacctgtcccagacagggggataacacttggaaacaggtgctaataccgcataagaccacgggatcacatggttctggggtaaaaggagca

SEQ ID NO: 2885 - DNA, 225 bp, Unknown
  bacterial strain Ascusb_4617 encodes 16S rRNA
agagtttgatcatggctcaggatgaacgctggcggcgtgcctaacacatgcaagtcgaacggacttttcatcttagaggcttcggccaaagaggtttaaagttagtggcggacgggtgagtaacgcgtggagaacctgcctcatgctgggggataacagtgagaaatcactgctaataccgcataagcgcacgaaggcgcatgcctttgtgtgaaaaactccggt

SEQ ID NO: 2886 - DNA, 225 bp, Unknown
  bacterial strain Ascusb_2017 encodes 16S rRNA
agagtttgatcatggctcaggatgaacgctagctacaggcttaacacatgcaagtcgaggggcagcatgatcgaagcttgctttgattgatggcgaccggcgcacgggtgagtaacgcgtatccaaccttccctatagtagaggatagcccggcgaaagtcggattaatactctatgttttccgaagcagacatctaatttggaacaaaggttcaccgctatagg

SEQ ID NO: 2887 - DNA, 225 bp, Unknown
  bacterial strain Ascusb_1867 encodes 16S rRNA
agagtttgatcatggctcaggacgaacgctggcggcatgcctaacacatgcaagtcgaacgagagtagcaatactcgagtggcgaacgggtgagtaacacgtgagcaacctgccttacacaacgggatacctactggaaacagtagttaatacggtataagaccacagtaccgcatgatacagtggtaaaagatttatcggtgtaagatgggctcgcggcgcatt

SEQ ID NO: 2888 - DNA, 225 bp, Unknown
  bacterial strain Ascusb_2558 encodes 16S rRNA
agagtttgatcatggctcaggatgaacgctagcggcaggcctaacacatgcaagtcgaggggcagcagggcgtagcaatacgctgctggcgaccggcgcacgggtgcgtaacgcgtatgcaacctacccataacagggggataacggggtgaaaaccccactaataccccgtatagacacttggtcgcatggccgggtgtcgaaagccttcgggtggttatggat

SEQ ID NO: 2889 - DNA, 225 bp, Unknown
  bacterial strain Ascusb_2949 encodes 16S rRNA
agagtttgatcctggctcaggatgaacgctggcggcgtgcttaacacatgcaagtcgaacgaagcatttgttcggatttcttcggattgaagaacttatgacttagtggcggacgggtgagtaacgcgtggggaacctgccccataccgggggacaacagctggaaacggctgctaataccgcataagcgcacgggatggcatcatccagtgtgaaaaactccgg

SEQ ID NO: 2890 - DNA, 225 bp, Unknown
  bacterial strain Ascusb_2428 encodes 16S rRNA
agagtttgatcctggctcaggataaacgctggcggcgtgcttaacacatgcaagtcgaacggggtaatcctcccgaagacctgacgagcttgctctgacggaattcatttggattacttagtggcggacgggtgagtaacgcgtgggaaacctgcctcacactgggggatagcagttggaaacgactgataataccgcataagcgcacagcaccgcatggtgcag

SEQ ID NO: 2891 - DNA, 225 bp, Unknown
  bacterial strain Ascusb_8175 encodes 16S rRNA
agagtttgatcctggctcaggacgaacgctggcggcgtgcttaacacatgcaagtcgagcggggatagaattggaagttcttcgggatggaagattttattctagcggcggacgggtgagtaacgcgtgaacaatctgtcccagacagggggataacacttggaaacaggtgctaataccgcataagaccacgttttcgcatgggaatgaggtaaaaggagcgat

SEQ ID NO: 2892 - DNA, 225 bp, Unknown
  bacterial strain Ascusb_1733 encodes 16S rRNA
agagtttgatcctggctcaggatgaacgctggcggcacgcttaacacatgcaagtcgaacggagcagaaagagcttgcttttcctgctcagtggcggacgggtgcgtaacgcgtgggtaatctgcccttgacagggggataacgtatagaaatgtacgctaataccgcataagctcacggagtggcatcactctgggggaaaagggataccggtcaaggatgagc

SEQ ID NO: 2893 - DNA, 225 bp, Unknown
  bacterial strain Ascusb_2483 encodes 16S rRNA
agagtttgatcctggctcaggatgaacgctagctacaggcttaacacatgcaagtcgaggggcagcgggaagaaagcttgctttctttgccggcgaccggcgcacgggtgagtaacgcgtatccaaccttccccttagtagggcatagcccggcgaaagtcggattaataccctatgttattcgtagaggacatctgaaatgaatcaaagatttatcgctaaggg

SEQ ID NO: 2894 - DNA, 225 bp, Unknown
  bacterial strain Ascusb_694 encodes 16S rRNA
agagtttgatcatggctcaggacgaacgctggcggcacgcttaacacatgcaagtcgaacgaacgaaggagagcttgctctccggagttagtggcggacgggtgagtaacacgtgagcaacctgccttcgagcgaggaataatggctggaaacggccactaatacctcataatgcagcggtaccgcatgatactgctgccaaagatttatcacttgaagatgggc

SEQ ID NO: 2895 - DNA, 225 bp, Unknown
  bacterial strain Ascusb_862 encodes 16S rRNA
agagtttgatcatggctcaggatgaacgctggcggcgtgcttaacacatgcaagtcgaacggagacaaacgccgattgaagcttcggcagaaatcatgtttgtcttagtggcggacgggtgagtaacgcgtgggtaacctgccttataccgggggataacacttagaaataggtgctaataccgcataagcgcacagcttcgcatgaagcagtgtgaaaaactcc

SEQ ID NO: 2896 - DNA, 225 bp, Unknown
  bacterial strain Ascusb_740 encodes 16S rRNA
agagtttgatcatggctcaggacgaacgctggcggcgtgcctaacacatgcaagtcgagcggggacatacagtgaagaggaagttttcggatggaattggaacggtatgttctagcggcggacgggtgagtaacgcgtgagcaacctgtccttcacagggggataacacagcgaaagttgtactaataccgcataagaccacggagctgcatggctttggggtca

SEQ ID NO: 2897 - DNA, 225 bp, Unknown
  bacterial strain Ascusb_6782 encodes 16S rRNA
agagtttgatcatggctcaggatgaatgctggcggcgtgcctaatacatgcaagtcgagcggtaacagggtttcaccgtttccttgacacacctagcgtattatcgtaggttgttagtttcgagggaacagtgaagctgctgacgagcggcggacggctgagtaacgcgtgggaacggaccccaaactgagggataactagtcgaaagattagctaataccgcat

SEQ ID NO: 2898 - DNA, 225 bp, Unknown
  bacterial strain Ascusb_619 encodes 16S rRNA
agagtttgatcctggctcaggatgaacgctagctacaggcttaacacatgcaagtcgaggggcagcatgcaggtagcttgctatctgtgatggcgaccggcgcacgggtgagtaacgcgtatccaaccttccccgtagtagggcacagcccggcgaaagtcggattaattccctatgttctccaatgcagacatctaagttggagcaaagattcatcgctatggg

SEQ ID NO: 2899 - DNA, 225 bp, Unknown
  bacterial strain Ascusb_4139 encodes 16S rRNA
agagtttgatcctggctcaggacgaacgctggcggcgtgcctaacacatgcaagtcgaacggacgagaggagcttgctcctcgagttagtggcgaacgggtgagtaacgcgtgagcaacctgcctttcagagggggacaacggttggaaacgaccgctaataccgcatgatgtattctggtcgcatgatcggggtgccaaagatttatcgctgaaagatgggctc

SEQ ID NO: 2900 - DNA, 225 bp, Unknown
  bacterial strain Ascusb_4328 encodes 16S rRNA
agagtttgatcctggctcaggataaacgctggcggcgcacataagacatgcaagtcgaacggaagtcgttatactgattttgaaaggaactgagaacttgttcaacgggactggatggagatttataacaatggctttagtggcggactggtgagtaatacgtaagcaacctgcctattagaggggaacaacagttagaaatgactgctaataccgcatatgcct

SEQ ID NO: 2901 - DNA, 225 bp, Unknown
  bacterial strain Ascusb_4258 encodes 16S rRNA
agagtttgatcatggctcaggataaacgctggcggcgcacataagacatgcaagtcgaacgagaatcgttaaaaacggattgaagatttatcagattgaagtttttaacaatggttctagtggcggactggtgagtaacacgtaagcaacctgcctattagaggggaataacagtgagaaatcattgctaataccgcatatgctcacagaatcacatgatttagt

SEQ ID NO: 2902 - DNA, 225 bp, Unknown
  bacterial strain Ascusb_783 encodes 16S rRNA
agagtttgatcatggctcaggatgaacgctggcggcgtgcttaacacatgcaagtcgaacggagtttatggagcttgctctgtaaacttagtggcggacgggtgagtaacgcgtgggtaacctgcctttcacagggggataacagttagaaatgactgctaataccgcataagcgcacaggacggcatcgtctggtgtgaaaaactccggtggtgaaagatggac

SEQ ID NO: 2903 - DNA, 225 bp, Unknown
  bacterial strain Ascusb_9575 encodes 16S rRNA
agagtttgatcatggctcaggacgaacgctggcggcgtgcttaacacatgcaagtcgaacggggtctattagcttgctaagacgacctagtggcaaacgggtgagtaacgcgtgggcaacctgccggaaagatggggacaacatcccgaaaggggtgctaataccgaatgttgtacgagggacgcatgttccatgtactaaaggatcctatccgctttccgatgg

SEQ ID NO: 2904 - DNA, 225 bp, Unknown
  bacterial strain Ascusb_7129 encodes 16S rRNA
agagtttgatcctggctcaggatgaacgctagcggcaggcttaacacatgcaagtcgaggggcatcgcggggtagcaatactctggcggcgaccggcgaaagggtgagtaacgcgtgagcaacatgcccgtaggtggaggatagtcgatggaaacgtcgtgtaatactccgtaacaacagttttcgcatggagattgtttaatagattgattgcctacggattgg

SEQ ID NO: 2905 - DNA, 225 bp, Unknown
  bacterial strain Ascusb_968 encodes 16S rRNA
agagtttgatcatggctcaggatgaacgctggcggcgtgcctaacacatgcaagtcgaacggaaaccaagcgcttcggagacttcggtcaatgtttgtttggttttagtggcggacgggtgagtaacgcgtggataacctgcctcatacagggggataacagttagaaatgactgctaataccgcataagcgcacgggatcgcatgattctgtgtgaaaaactcc

SEQ ID NO: 2906 - DNA, 225 bp, Unknown
  bacterial strain Ascusb_6413 encodes 16S rRNA
agagtttgatcatggctcaggacgaacgctggcggcgtgcttcatacatgcaagtcgaacgataaggttccttcgggaatacataagtggcggacgggtgagtaatatgtagagaatctgccctgaagagggggacaacagagggaaacttctgctaataccccatatgcgcgtagttgagatactattcgtgaaagatttatcgcttcaggatgagtctgcatc

SEQ ID NO: 2907 - DNA, 225 bp, Unknown
  bacterial strain Ascusb_2603 encodes 16S rRNA
agagtttgatcctggctcaggatgaacgctggcggcgtgcctaacacatgcaagtcgaacggattttactcgctgcagagacttcggtcaaagcttgagtaaagttagtggcggacgggtgagtaacgcgtgggcaacctgcctcatactgggggataacagttggaaacgactgttaataccgcataagcgcacagcatcgcatgatgcagtgtgaaaaactcc

SEQ ID NO: 2908 - DNA, 225 bp, Unknown
  bacterial strain Ascusb_7646 encodes 16S rRNA
agagtttgatcctggctcaggacgaacgctggcggcgtgcttaacacatgcaagtcgaacgaggtgatattgcggaaggcttcggctggaagtgatatgaccgagtggcggacgggtgagtaacgcgtgagcaacctgtcttacacagggggataacgctccgaaaggagtgctaataccgcataagaccacggtaccgcatgatactgaggtaaaaggagaaat

SEQ ID NO: 2909 - DNA, 225 bp, Unknown
  bacterial strain Ascusb_1910 encodes 16S rRNA
agagtttgatcatggctcaggatgaacgctagctacaggcttaacacatgcaagtcgaggggcatcaggacgatagcttgctattgttgctggcgaccggcgcacgggtgagtaacgcgtatccaaccttccccatagtagaggatagcccggcgaaagtcggattaatactctatgttgtataatgatgacatcagacttataccaaagattgatcgctatggg

SEQ ID NO: 2910 - DNA, 225 bp, Unknown
  bacterial strain Ascusb_312 encodes 16S rRNA
agagtttgatcatggctcaggatgaacgctggcggcgtgcttaacacatgcaagtcgaacgggaattacattttagcttgctaagttgtaattctagtggcggacgggtgagtaacgcgtgggtaacctgccttataccgggggacaacagttggaaacgactgctaataccgcataagcgcacagtatcgcatgatacagtgtgaaaaactccggtggtataag

SEQ ID NO: 2911 - DNA, 225 bp, Unknown
  bacterial strain Ascusb_12026 encodes 16S rRNA
agagtttgatcatggctcaggatgaacgctggcggcatgcctaagacatgcaagtcgaacgaagtggcccattgaagatgaagtgcttgcactgatttggatttggattcccacttagtggcagacgggtgagtaacacgtgggtaacctaccccttagtctgggacaactattggaaacgatagctaataccggatgattcatagaaggataaccttctgtgct

SEQ ID NO: 2912 - DNA, 225 bp, Unknown
  bacterial strain Ascusb_2173 encodes 16S rRNA
agagtttgatcatggctcaggacgaacgctggcggcatgcctaacacatgcaagtcgaacggagtatgtttcttcggagatatatttagtggcgaacgggtgagtaacgcgtgagcaacctgcctcagtgagggggataacacttggaaacaggtgctaataccgcataagaccacaccgccgcatgacggaggggtcaaaggagcaatccgcactgagaggggc

SEQ ID NO: 2913 - DNA, 225 bp, Unknown
  bacterial strain Ascusb_3981 encodes 16S rRNA
agagtttgatcctggctcaggacgaacgctggcggcgtgcttaacacatgcaagtcgaacgaggttattttgaagagatcttcggatggatttgaaataaccgagtggcggacgggtgagtaacgcgtgagcaacctgtcttctacagggggataacgctccgaaaggagtgctaataccgcataagaccacgaagccgcatggttttgaggtcaaaggaggaat

SEQ ID NO: 2914 - DNA, 225 bp, Unknown
  bacterial strain Ascusb_5503 encodes 16S rRNA
agagtttgatcctggctcaggacgaacgctggcggcgtgcttaacacatgcaagtcgaacggggatagtcgtggaagtccttcgggatggaagggattattcgagtggcggacgggtgagtaacgcgtgaacaatctgtcccagacagggggataacacttggaaacaggtgctaataccgcataagaccacggggaggcatcttcctgaggtaaaaggagcgat

SEQ ID NO: 2915 - DNA, 225 bp, Unknown
  bacterial strain Ascusb_5183 encodes 16S rRNA
agagtttgatcatggctcaggacgaacgctggcggcgtgcttaacacatgcaagtcgaacggagttaagcgctgaattgaaggtagcttgctactggattttcttgcttaacttagtggcggacgggtgagtaacgcgtgagtaacctgcctctcagtggggaataacgccctgaaaagagcgctaataccgcataatatatttttgccgcatgacaggaatatc

SEQ ID NO: 2916 - DNA, 225 bp, Unknown
  bacterial strain Ascusb_1097 encodes 16S rRNA
agagtttgatcctggctcaggatgaacgctggcggcgtgcctaatacatgcaagtcgaacggaaatttaacgctgaggcgagcttgctcaattcttgttaaattttagtggcggacgggtgagtaacgcgtgggtaacctgccttacactgggggacaacagttggaaacgactgctaataccgcataagcgcacagaatcgcatgattcagtgtgaaaaactcc

SEQ ID NO: 2917 - DNA, 225 bp, Unknown
  bacterial strain Ascusb_5922 encodes 16S rRNA
agagtttgatcatggctcaggatgaacgctagctacaggcttaacacatgcaagtcgaggggcagcatgaagtttgcttgcaaactttgatggcgaccggcgcacgggtgagtaacgcgtatccaaccttccccttagtaggggatagcccggcgaaagtcggattaataccctatgttctcctttgaagacatctgacgaggagcaaagattgatcgctaaggg

SEQ ID NO: 2918 - DNA, 225 bp, Unknown
  bacterial strain Ascusb_951 encodes 16S rRNA
agagtttgatcatggctcaggacgaacgctggcggcgtgcctaacacatgcaagtcgaacggagatattccggattgagatttcggttgattgaaaggatatcttagtggcggacgggtgagtaacgcgtgagtaacctgcccataagagggggataacgttctgaaaagaacgctaataccgcataacatatgtaattcgcatggaagacatatcaaaggagca

SEQ ID NO: 2919 - DNA, 225 bp, Unknown
  bacterial strain Ascusb_701 encodes 16S rRNA
agagtttgatcctggctcaggatgaacgctagcggcaggcttaacacatgcaagtcgaggggcagcagggagtagcaatactctgctggcgaccggcgcacgggtgcgtaacgcgtatgcaacctaccctgtacagggggataacggagagaaatttccactaatatcccatggagtcatcggatcgcatggtctggtgactaaagcttcggtggtacgggatgg

SEQ ID NO: 2920 - DNA, 225 bp, Unknown
  bacterial strain Ascusb_6305 encodes 16S rRNA
agagtttgatcatggctcaggacgaacgctggcggcgtgcttaacacatgcaagtcgaacggagttaagcgctgaattgatgctagcttgctagtggattttcttgcttaacttagtggcggacgggtgagtaacgcgtgagtaacctgcctctcagtggggaataacgccctgaaaagagcgctaataccgcataacatatttttgccgcatgacagagatatc

SEQ ID NO: 2921 - DNA, 225 bp, Unknown
  bacterial strain Ascusb_1997 encodes 16S rRNA
agagtttgatcatggctcaggatgaacgctggcggcgtgcctaacacatgcaagtcgaacggaactgctttaaatgatttcttcggaatgaatttgttgtagtttagtggcggacgggtgagtaacgcgtgagtaacctgcccttcagagggggataacgatctgaaaagaccgctaataccgcataacatcacggtaccgcatgatactgtgatcaaaactcag

SEQ ID NO: 2922 - DNA, 225 bp, Unknown
  bacterial strain Ascusb_4483 encodes 16S rRNA
agagtttgatcctggctcaggatgaacgctagctacaggcttaacacatgcaagtcgaggggcagcatggggtttgcttgcaaaccccgatggcgaccggcgcacgggtgagtaacgcgtatccaacctgcccctgtcctcgggatagcccgccgaaaggcggattaataccggacgctgtcacatgatggcatcagagcgtgacgaaaggattttttccggaca

SEQ ID NO: 2923 - DNA, 225 bp, Unknown
  bacterial strain Ascusb_1532 encodes 16S rRNA
agagtttgatcatggctcaggatgaacgctagcggcaggcttaacacatgcaagtcgaggggtaacaggggatgtagcaatacatcctgctgacgaccggcgcacgggtgcgtaacgcgtatgcaacctgcccgcaacaggggtataacggagtgaaaattccactaatcccccatattgtcattaggccgcatggctttatgacgaaaggttattctggttgcg

SEQ ID NO: 2924 - DNA, 225 bp, Unknown
  bacterial strain Ascusb_4980 encodes 16S rRNA
agagtttgatcatggctcagaacgaacgctggcggcgcgtcttaagcatgcaagtcgagcggtaagattggtgcttgcactaatcctagagcggcggactggtgagtaacgcgtgggtgacgtaccttcgtgatggggacagctcctagaaataggagataataccgaatacgctgtgtgttgtcagaggacacacaggaaaggttcttttgaaccgcacggaga

SEQ ID NO: 2925 - DNA, 225 bp, Unknown
  bacterial strain Ascusb_7893 encodes 16S rRNA
agagtttgatcctggctcaggacgaacgctggcggcgtgcctaacacatgcaagtcgaacggagttatgttacgaagctcttcggaacggacgacatagcttagtggcggacgggtgagtaacgcgtgagcaacctgcctttcagagggggacaacggttggaaacgaccgctaataccgcatgaaatgactggaccgcatgatccggtcatcaaagattttatc

SEQ ID NO: 2926 - DNA, 225 bp, Unknown
  bacterial strain Ascusb_1107 encodes 16S rRNA
agagtttgatcatggctcaggatgaacgctagcggcaggcttaacacatgcaagtcgaggggcagcggagagtagcaatactctgccggcgaccggcgaaagggtgcgtaacgcgtgagcaacttgcccgtatccgggacataagcggtggaaacgccgtctaatttcccataacaacagaggccgcatgacctttgtttgaaagatccgtcggatacggatggg

SEQ ID NO: 2927 - DNA, 225 bp, Unknown
  bacterial strain Ascusb_2781 encodes 16S rRNA
agagtttgatcctggctcaggatgaacgctagctacaggcttaacacatgcaagtcgaggggcagcatgacgatagcttgctattgtcgatggcgaccggcgcacgggtgagtaacgcgtatccaaccttccccttagtagggcatagcccggcgaaagtcggattaataccctatgttgtcgtttgaagacatctgaagacgattaaagattgatcgctaaggg

SEQ ID NO: 2928 - DNA, 225 bp, Unknown
  bacterial strain Ascusb_186 encodes 16S rRNA
agagtttgatcatggctcaggacgaacgctggcggcgtgcttaacacatgcaagtcgaacgaggttaattgaaggaagtcttcggatggaatttggttaaccgagtggcggacgggtgagtaacgcgtgaggaacctgtcttctacagggggataacggtccgaaaggattgctaataccgcataagaccacgaagtcgcatggctttgaggtcaaaggagaaat

SEQ ID NO: 2929 - DNA, 225 bp, Unknown
  bacterial strain Ascusb_4154 encodes 16S rRNA
agagtttgatcatggctcaggatgaacgctagcgacaggcctaacacatgcaagtcgagcggcagcaccttgggtggcgagcggcgcacgggtgagtaacgcgtatgtaacctgcccatgagtgggggatagcccggtgaaaaccggattaataccccatgacaccattgtctgacatcatttaatggttaaagattcattgctcatggatggacatgcgttgga

SEQ ID NO: 2930 - DNA, 225 bp, Unknown
  bacterial strain Ascusb_3125 encodes 16S rRNA
agagtttgatcatggctcaggatgaacgctagcggcaggcttaacacatgcaagtcgaggggcagcgcggagtagcaatactctggcggcgaccggcaaaagggtgcgtaacacgtgagcaacctgcccgtcacagggggataagcgctggaaacggcgtctaataccgcgtaacacatttttccgcatggatggatgttgaaaatttcgatggtgacggatggg

SEQ ID NO: 2931 - DNA, 225 bp, Unknown
  bacterial strain Ascusb_3663 encodes 16S rRNA
agagtttgatcctggctcaggatgaacgctagctacaggcttaacacatgcaagtcgaggggcagcagatcgatagcttgctattgatgctggcgaccggcgcacgggtgagtaacgcgtatccaaccttccctatagtagaggatagcccggcgaaagtcggattaatactctatgttttccaatgcagacatctaagttggaacaaaggtttaccgctatagg

SEQ ID NO: 2932 - DNA, 225 bp, Unknown; identical to SEQ ID NO: 2308
  bacterial strain Ascusb_21055 encodes 16S rRNA

SEQ ID NO: 2933 - DNA, 225 bp, Unknown
  bacterial strain Ascusb_481 encodes 16S rRNA
agagtttgatcatggctcaggatgaacgctggcggcgtgcttaacacatgcaagtcgaacggaaatgtattgaaacctagtgatatacattttagtggcggacgggtgagtaacgcgtgggtaacctgccgtatgcagggggataacagttagaaatgactgctaataccgcataagaccacagtctcgcatgagacaggggtaaaaactccggtggcatacgat

SEQ ID NO: 2934 - DNA, 225 bp, Unknown
  bacterial strain Ascusb_2385 encodes 16S rRNA
agagtttgatcatggctcaggatgaacgctggcggcgtgcctaacacatgcaagtcgagcgataagcacatttgatgaaacttcggtagattctggtgctgaaagcggcggacgggtgagtaacgcgtaggcaacctgcccttagcagggggatagccattggaaacgatgattaaaaccccataacacgaggacgtcacatgtcgacctcgtcaaagatttatc

SEQ ID NO: 2935 - DNA, 225 bp, Unknown
  bacterial strain Ascusb_5048 encodes 16S rRNA
agagtttgatcctggctcaggatgaacgctggcggcgtgcctaacacattcaagtcgaacgagccgtagaaatacggcgagtggcggacgggtgagtaacgcgtaagcaatctgcctttgtgtgtggaataacaaccggaaacagttgctaataccgcataacgcataggaatcgcatggttcttatgccaaagatttatcgcacgaagatgagcttgcgtccga

SEQ ID NO: 2936 - DNA, 225 bp, Unknown
  bacterial strain Ascusb_5207 encodes 16S rRNA
agagtttgatcatggctcaggatgaacgctggcggcatgcctaagacatgcaagtcgtacgaggtggcccaatgaaaatggagtgcttgcacaaagtcggatttggatttccaccgagtggcaaacgggtgagtaacacgtgggttacctacctctaagacggggataccaattggaaacgattgttaataccggatgtgctctacggagtaaagaagcctttaa

SEQ ID NO: 2937 - DNA, 225 bp, Unknown
  bacterial strain Ascusb_14795 encodes 16S rRNA
agagtttgatcatggctcaggatgaacgctggcggcatgcctaagacatgcaagtcgtacgaggtggccctttgacttttgtgcttgcacaagatgattaggaatttccacctagtggcgaaagggtgagtaacacgtgggttatctacctcagagactgggataactactagaaatggtagctaatactggatgatatgtataatgatacgttattatatatta

SEQ ID NO: 2938 - DNA, 225 bp, Unknown
  bacterial strain Ascusb_321 encodes 16S rRNA
agagtttgatcatggctcaggatgaacgctagctacaggcttaacacatgcaagtcgaggggcagcatatagatagcttgctatttatgatggcgaccggcgcacgggtgagtaacgcgtatccaaccttccctatactagagaatagcccggcgaaagtcggattaatgctctatgttcttctttgatggcatctgacgagaagcaaaggtttaccggtatagg

SEQ ID NO: 2939 - DNA, 225 bp, Unknown
  bacterial strain Ascusb_2494 encodes 16S rRNA
agagtttgatcatggctcaggatgaacgctagctacaggcttaacacatgcaagtcgaggggcagcatagcgagagcttgcttttgctgatggcgaccggcgcacgggtgagtaacgcgtatccaaccttccctgtactagagaatagcccggcgaaagtcggattaatgctctatgttcttctttgatggcatctgacgagaagcaaaggtttaccggtatagg

SEQ ID NO: 2940 - DNA, 225 bp, Unknown
  bacterial strain Ascusb_5237 encodes 16S rRNA
agagtttgatcctggctcaggatgaacgctagcggcaggcttaacacatgcaagtcgaggggcagcgcgggtagcaatacttggcggcgaccggcgaaagggtgagtaacgcgtgagcaacatacccgttggtgggggataggaggtggaaacgccttgtaataccccatatgatattgaatggcatcatttagtattgaaagattcattgccaacggattggtt

SEQ ID NO: 2941 - DNA, 225 bp, Unknown
  bacterial strain Ascusb_93 encodes 16S rRNA
agagtttgatcatggctcaggacgaacgctggcggcacgcttaacacatgcaagtcgaacggagttatcgagagcttgcttttgataacttagtggcggacgggtgagtaacacgtgagcaatctgcccttaagagggggatagcagttggaaacgactgataataccgcataagatagtagtaccgcatggtacagctataaaagatttatcgcttaaggatga

SEQ ID NO: 2942 - DNA, 225 bp, Unknown
  bacterial strain Ascusb_1360 encodes 16S rRNA
agagtttgatcctggctcaggatgaacgctggcggcgtgcctaacacatgcaagtcgaacggacttaagacgctgatgaggcttcggcggattcttgttttaagttagtggcggacgggtgagtaacgcgtgggcaacctgcctcatactgggggatagcagttggaaacgactgataataccgcataagcgcacagagtcgcatgactcagtgtgaaaaactcc

SEQ ID NO: 2943 - DNA, 225 bp, Unknown
  bacterial strain Ascusb_14034 encodes 16S rRNA
agagtttgatcatggctcaggatgaacgctggcggcgcgcctaacacatgcaagtcgaacggttaaagcaccttcgggtgtgtataaagtggcgaacggctgagtaacacgtgggcaacctgcccctcgcaccgggacagcctcgggaaaccgtggttaataccggatacgccgcccaccccgcatggggagggcgggaaagccccgacggcgagggatgggccc

SEQ ID NO: 2944 - DNA, 225 bp, Unknown
  bacterial strain Ascusb_1883 encodes 16S rRNA
agagtttgatcatggctcaggatgaacgctggcggcgtgcttaacacatgcaagtcgaacgaggttattacagttgaagttttcggatggatacagtattaaccgagtggcggacgggtgagtaacgcgtgggaaacctgccctattccgggggataccagttggaaacgactgttaataccgcataagcgcacggcaccgcatggtgcagtgtgaaaaactccg

SEQ ID NO: 2945 - DNA, 225 bp, Unknown
  bacterial strain Ascusb_3710 encodes 16S rRNA
agagtttgatcctggctcaggatgaacgctggcggcgtgcttaacacatgcaagtcgaacggaactgcatatgaagatttacttcggtaatgattttttgtagtttagtggcggacgggtgagtaacgcgtgagtaacctgcccttgagagggggataacgttctgaaaaggacgctaataccgcataacattatcatatcgcatggtaggataatcaaaactga

SEQ ID NO: 2946 - DNA, 225 bp, Unknown
  bacterial strain Ascusb_1248 encodes 16S rRNA
agagtttgatcctggctcaggatgaacgctggcggcgtgcttaacacatgcaagtcgaacggaacttttctcccgaagaagcggagtgcttgcacaaagtagattcatttgaaaagtttagtggcggacgggtgagtaacgcgtgggtaacctgccttacacagggggacaacagttggaaacgactgctaataccgcataagcgcacagtaccgcatggtacag

SEQ ID NO: 2947 - DNA, 225 bp, Unknown
  bacterial strain Ascusb_638 encodes 16S rRNA
agagtttgatcctggctcagaacgaacgctggcggcaggcttaacacatgcaagttgaacgggatttgatggtagcttgctatcattaatgagagtagcgcactggtgagtaacacgtgggaacataccttttggtgggggacaacagttggaaacgactgctaataccgcataagccctaagggggaaaggagaaatttgccgaaagattggcccgcggaagat

SEQ ID NO: 2948 - DNA, 225 bp, Unknown
  bacterial strain Ascusb_9615 encodes 16S rRNA
agagtttgatcctggctcaggatgaacgctagctacaggcttaacacatgcaagtcgaggggcatcatgggagtagcttgctacttttgatggcgaccggcgaatgggtgagtaacgcgtatccaacctgccgcagacccgggaatagcccttggaaatgaggattaagtcccgatatgcacattatccgcatggtttatgtgtgaaactaggtatgcgatgggg

SEQ ID NO: 2949 - DNA, 225 bp, Unknown
  bacterial strain Ascusb_3378 encodes 16S rRNA
agagtttgatcatggctcaggatgaacgctggcggcgtgcttaacacatgcaagtcgaacgaagcactggaaaatggagattcgtcaaagttttcctttgactgagtggcgaacgggtgagtaatgcgtgagcaacctgcccttcagagggggacaacagttggaaacgactgctaataccgcatgacgtgttcgggcggcatcgtctgaacaccaaaggagaaa

SEQ ID NO: 2950 - DNA, 225 bp, Unknown
  bacterial strain Ascusb_5885 encodes 16S rRNA
agagtttgatcatggctcaggacgaacgctggcggcgtgcctaacacatgcaagtcgagcggggattattgtgatgagagcttcggcaggattcgtggtaattctagcggcggacgggtgagtaacgcgtgaacaatctgtcccggacagggggataacacttggaaacaggtgctaataccgcataagaccacagggcggcatcgtccaggggtcaaaggagcg

SEQ ID NO: 2951 - DNA, 225 bp, Unknown
  bacterial strain Ascusb_1138 encodes 16S rRNA
agagtttgatcatggctcaggataaacgctggcggcgtgcctaatacatgcaagtcgatcgctggagctcaagcttgcttgagtgaaggagaggcgaacgggtgagtaatacataagcaacctgcccacgaagactgggataatctctggaaacggggactaataccggataggtgacaagatcgcatgatcatgtcattaaagattcaaagcactggtggatgg

SEQ ID NO: 2952 - DNA, 225 bp, Unknown
  bacterial strain Ascusb_108 encodes 16S rRNA
agagtttgatcatggctcaggatgaacgctggcggcgtgcttaacacatgcaagtcgaacgaggttaattgagcggattatttcggtatgaagcgcttttaactgagtggcggacgggtgagtaacgcgtgggcaacctgcctcattcagggggataccagttggaaacgactgttaataccgcataagcgcacggttccgcatggaacagtgtgaaaagctccg

SEQ ID NO: 2953 - DNA, 225 bp, Unknown
  bacterial strain Ascusb_613 encodes 16S rRNA
agagtttgatcctggctcaggatgaacgctggcggcgtgcttaacacatgcaagtcgagcgaagctctcttgttgatttcttcggattgaaacaagagatgactgagcggcggacgggtgagtaacgcgtggagaacctgccccgtaccgggggataacagttagaaatgactgctaataccgcataagcgcacactatcgcatgatagagtgtgaaaaactccg

SEQ ID NO: 2954 - DNA, 225 bp, Unknown
  bacterial strain Ascusb_3773 encodes 16S rRNA
agagtttgatcatggctcaggatgaacgctagctacaggcttaacacatgcaagtcgaggggcagcatgaagtttgcttgcaaactttgatggcgaccggcgcacgggtgagtaacgcgtatccaaccttccctacagtagggtatagcccggcgaaagtcggattaatcccctatgttctccatggatggcatctgatatggagcaaaggattccgctgtagga

SEQ ID NO: 2955 - DNA, 225 bp, Unknown
  bacterial strain Ascusb_12477 encodes 16S rRNA
agagtttgatcatggctcaggatgaacgctggcggcatgcctaagacatgcaagtcgtacgaagtgacccattgaagtggagtgcttgcacaaagcggatttggattttcacttagtggcgcaagggtgagtaacacgtgggtaatctgccttggagactggaataacaattagaaatgattgctaatgccggatgatatataaaaggatacgttcttttatagt

SEQ ID NO: 2956 - DNA, 225 bp, Unknown
  bacterial strain Ascusb_10375 encodes 16S rRNA
agagtttgatcatggctcaggatgaacgctagctacaggcttaacacatgcaagtcgaggggcatcgggagagtagcttgctattcttgccggcgaccggcgcacgggtgagtaacgcgtatccaacctaccccatacaagaggatagcccggcgaaagtcggattaatactctatgtagtacgatgaaggcatctgagttgtatgaaaggttttccggtatggg

SEQ ID NO: 2957 - DNA, 225 bp, Unknown
  bacterial strain Ascusb_15425 encodes 16S rRNA
agagtttgatcatggctcaggatgaacgctggcggcatgcctaagacatgcaagtcgaacgagaaggcccattgaagattgcgtgcttgcacaaaattggatttggattcccttctagtggcgcaagggtgagtaacacgtgggtaatctgcctttgagtctggaataacagttagaaatgattgctaatgccggatgatacataaaacgatacgtcattttatg

SEQ ID NO: 2958 - DNA, 225 bp, Unknown
  bacterial strain Ascusb_1030 encodes 16S rRNA
agagtttgatcatggctcaggacgaacgctggcggcgtgcctaacacatgcaagtcgaacggagctttacgctgaaattgagagcagcttgctgcaggaaatttcttgtaacgcttagtggcggacgggtgagtaacgcgtgaggaacctgccttacagagggggacaacagttggaaacgactgctaataccgcataacatagcgaaaggacatccttttgtta

SEQ ID NO: 2959 - DNA, 225 bp, Unknown
  bacterial strain Ascusb_847 encodes 16S rRNA
agagtttgatcatggctcaggatgaacgctggcggcgtgcttaacacatgcaagtcgaacgaggttattgcagttgaagttttcggatggatacagcattaaccgagtggcggacgggtgagtaacgcgtggggaacctgccccattccgggggataccagttggaaacgactgttaataccgcataagcgcacagtaccgcatggtacggtgtgaaaaactccg

SEQ ID NO: 2960 - DNA, 225 bp, Unknown
  bacterial strain Ascusb_13295 encodes 16S rRNA
agagtttgatcctggctcaggatgaacgctagctacaggcttaacacatgcaagtcgaggggaaacgattagaggtgcttgcaccactaaggcgtcgaccggcgcacgggtgagtaacgcgtatccaacctacctcatggtaaggaataatccgtagaaatgcggtctaataccttatgtgctccgaagaggacatctgatttggagtaaagatttatcgccatg

SEQ ID NO: 2961 - DNA, 225 bp, Unknown
  bacterial strain Ascusb_9754 encodes 16S rRNA
agagtttgatcatggctcaggatgaacgctggcggcatgcctaagacatgcaagtcgaacgaagtggcccaatgaaaatggagtacttgtacaaaattagatttggatttctacttagtggcagacgggtgagtaacacgtaagtaacctaccttaaagactgggataacgtttggaaacgaacgctaataccggataattcattactagataactagaaatgct

SEQ ID NO: 2962 - DNA, 225 bp, Unknown
  bacterial strain Ascusb_350 encodes 16S rRNA
agagtttgatcatggctcaggactaacgctggcggtgcgcctaacacatgcaagtcgtacgggctccttcgggagctagtggcagacgggtgagtaacgcgtaggtaatgtacctcttcgctggggatacctacctgaaaaggtggctaaaaccgaatgagcttttcaagcggcatcgcttgatttgcaaacctccggggcgaagagatcagcttgcgtactatc

SEQ ID NO: 2963 - DNA, 225 bp, Unknown
  bacterial strain Ascusb_2056 encodes 16S rRNA
agagtttgatcatggctcaggacgaacgctggcggcgtgcctaacacatgcaagtcgagcggagattatggaagagcttgctcggagataatttcagcggcggacgggtgagtaacgcgtgagcaacctgccttcaacagggggataacgcatcgaaagatgtgctaataccgcgtaagaccacagcatcacatggtgcaggggtcaaaggagcaatccggttga

SEQ ID NO: 2964 - DNA, 225 bp, Unknown
  bacterial strain Ascusb_3134 encodes 16S rRNA
agagtttgatcctggctcaggatgaacgctggcggcgtgcctaatacatgcaagtcgagcgagaaccgaatgaacagagattcgtcaaagtgatttcggggaaagcggcggacgggtgagtaacgcgtaggcaacctgcccttagcagagggatagccattggaaacgatgattaaaacctcataatgcttttgagacacatgtcacaagagccaaagatttatc

SEQ ID NO: 2965 - DNA, 225 bp, Unknown
  bacterial strain Ascusb_57 encodes 16S rRNA
agagtttgatcctggctcaggatgaacgctagctacaggcttaacacatgcaagtcgaggggcagcgagaggaaagcttgctttccttgtcggcgaccggcgcacgggtgagtaacgcgtatccaaccttccccttagtagggcatagcccggcgaaagtcggattaacaccctatgttatccgaagaggacatctgaattggattaaaggtttaccgctaaggg

SEQ ID NO: 2966 - DNA, 225 bp, Unknown
  bacterial strain Ascusb_1427 encodes 16S rRNA
agagtttgatcctggctcaggatgaacgctggcggcgtgcttaacacatgcaagtcgaacgagggttatcggttgaagttttcggacggaaacggataattcctagtggcggacgggtgagtaacgcgtggggaacctgccccattccgggggataccagttggaaacgactgttaataccgcataagcgcacggtactgcatggtacagtgtgaaaaactccgg

SEQ ID NO: 2967 - DNA, 225 bp, Unknown
  bacterial strain Ascusb_14918 encodes 16S rRNA
agagtttgatcctggctcaggatgaacgctagctacaggcttaacacatgcaagtcgaggggaaacgattagaggtgcttgcaccactaaggcgtcgaccggcgcacgggtgagtaacgcgtatccaacctgccccatggtaaggaataatccgtagaaatgcggtctaataccttatgtgctccgaagaggacatctgatttggagtaaagatttatcgccatg

SEQ ID NO: 2968 - DNA, 225 bp, Unknown
  bacterial strain Ascusb_8785 encodes 16S rRNA
agagtttgatcatggctcagaacgaacgctggcggcgcgtcttaagcatgcaagtcgaacggcaaggcgggtgcttgcacctgccccagagtggcggactggtgagtaacacgtgggtgacataccccccggacggggatagccggtagaaataccgggtaataccggatacggtcgcgcaggttagagctgcgcgaggaaaggagctgcggctccgccggggga

SEQ ID NO: 2969 - DNA, 225 bp, Unknown
  bacterial strain Ascusb_3529 encodes 16S rRNA
agagtttgatcctggctcaggatgaacgctggcggcgtgcctaacacatgcaagtcgaacggagttaagggatattttcgaatggaacttaacttagtggcggacgggtgagtaacgcgtggataacctgcctcgcacagggggatagcagctggaaacggctgataataccgcataagactacagcaccgcctggtgcaggagtaaaagatttatcggtgcgag

SEQ ID NO: 2970 - DNA, 225 bp, Unknown
  bacterial strain Ascusb_2514 encodes 16S rRNA
agagtttgatcatggctcaggatgaacgctagcggcaggcttaacacatgcaagtcgaggggtaacgcgaggtagcaatactttggcgacgaccggcgcacgggtgcgtaacgcgtatgcaacctacctgtaacagggggataacggagtgaaaattccactaataccccatattgtcattctttcgcatgttgggatgacgaaagcttcggtggttacggatgg

SEQ ID NO: 2971 - DNA, 225 bp, Unknown
  bacterial strain Ascusb_16784 encodes 16S rRNA
agagtttgatcctggctcaggacgaacgctggcggcgtgcctaacacatgcaagtcgagcggagtcataatgaaagcttgctggatttatgacttagcggcggacgggtgagtaacgcgtgagcaatctgtccctcacagggggataataccgcgaaagtggttctaataccgcatgagaccacggatcggcatcgatctggggtcaaaggagcaatccggtgag

SEQ ID NO: 2972 - DNA, 225 bp, Unknown
  bacterial strain Ascusb_2887 encodes 16S rRNA
agagtttgatcctggctcaggatgaacgctggcggcgtgcctaacacatgcaagtcgaacggaactgcatatgaagatttccttcgggaatgattcgcttgtagtttagtggcggacgggtgagtaacgcgtgagtaacctgcccttgagagggggataacgttctgaaaagaacgctaataccgcataacactattttatcgcatggtagaatagtcaaaactc

SEQ ID NO: 2973 - DNA, 225 bp, Unknown
  bacterial strain Ascusb_6350 encodes 16S rRNA
agagtttgatcatggctcagaacgaacgctggcggcgcgtcttaagcatgcaagtcgagcggtaagtcgggagcttgctcctgacctagagcggcggactggtgagtaacgcgtgggtgacgtaccttcgtgacggggatagctcctagaaataggagataataccggataatctcttatgtgtcagaggcatgagaggaaaggatcttttgattcgcacggaga

SEQ ID NO: 2974 - DNA, 225 bp, Unknown
  bacterial strain Ascusb_9114 encodes 16S rRNA
agagtttgatcctggctcaggacgaacgctggcggcgtgcttaacacatgcaagtcgaacgaggattagcggattgagagtttcgacaggattgaagctaattcgagtggcggacgggtgagtaacgcgtgagcaatctgtcccagacagggggataacacttggaaacaggtgctaataccgcataagaccacggcatcgcatggtgcaggggtaaaaggagga

SEQ ID NO: 2975 - DNA, 225 bp, Unknown
  bacterial strain Ascusb_5488 encodes 16S rRNA
agagtttgatcctggctcaggatgaacgctagctacaggcttaacacatgcaagtcgaggggcagcagggttgttgcttgcaacaaccgctggcgaccggcgcacgggtgagtaacgcgtatccaacctggcccacagtagggaacagcccggcgaaagtcggattaatgccctatgttttcctttgagagcatttgacgaggaacaaagattcatcgctatggg

SEQ ID NO: 2976 - DNA, 225 bp, Unknown
  bacterial strain Ascusb_3254 encodes 16S rRNA
agagtttgatcctggctcaggataaacgctggcggcatgcctaatacatgcaagtcaaacgggaagtagcaatacttctagtggcgaacgggtgagtaacacgtgggcaacctgccttgaagacgaggataacagttggaaacgactgataatactggatagtatacattaccgcatggttttgtatttaaagatgcgtttgcatcacttcaagaggggcctgcg

SEQ ID NO: 2977 - DNA, 225 bp, Unknown
  bacterial strain Ascusb_3802 encodes 16S rRNA
agagtttgatcatggctcaggatgaacgctagctacaggcttaacacatgcaagtcgaggggcagcatgttggttgcttgcaaccaatgatggcgaccggcgcacgggtgagtaacgcgtatccaacctcccccacagtagaggatagcccggcgaaagtcggattaatactctatgttgtattttgaggacatctgacgaataccaaagatttatcgctatggg

SEQ ID NO: 2978 - DNA, 225 bp, Unknown
  bacterial strain Ascusb_1079 encodes 16S rRNA
agagtttgatcatggctcaggatgaacgctagcggcaggcttaacacatgcaagtcgaggggtaacgcggggtagcaataccttggcgacgaccggcgcacgggtgcgtaacgcgtatgcaacctgcccgtaacagggggataacggggagaaattcccactaataccccatattatcgcgtagccgcatggttgtgcgatgaaagtttcgatggttacggatgg

SEQ ID NO: 2979 - DNA, 225 bp, Unknown
  bacterial strain Ascusb_1906 encodes 16S rRNA
agagtttgatcatggctcaggattaacgctggcggcatgcctaatacatgcaagtcgaatggttagcttgctaaccatggcgaacgggtgagtaacacgtaggtaacctgtcttcaagacgaggataaccattggaaacgatggataatactggataggacaaatccccgcatgaggagatgtttaaaggagcaatccacttgatgaggggcctgcggtgcatta

SEQ ID NO: 2980 - DNA, 225 bp, Unknown
  bacterial strain Ascusb_4524 encodes 16S rRNA
agagtttgatcatggctcaggatgaacgctagcggcaggcctaacacatgcaagtcgaggggcagcgcggggtagcaataccctggcggcgaccggcgcacgggtgcgtaacgcgtatgcaacctgccctgtacagggggataacggggtgaaaactccactaatatcccatagtgccacttggtcgcatggccgggtgtctaaagcttcggtggtacaggatgg

SEQ ID NO: 2981 - DNA, 225 bp, Unknown
  bacterial strain Ascusb_3927 encodes 16S rRNA
agagtttgatcatggctcaggatgaacgctggcggcgtgcctaacacatgcaagtcgagcggagatgttgagagattcttcggatgatcacttcatcttagcggcggatgggtgagtaacacgtgggtaacctgccctgcacagggggataacagctggaaacggctgttaataccgcatatgcacacgctgccgcatggcagggggtggaaagatttatcggtg

SEQ ID NO: 2982 - DNA, 225 bp, Unknown
  bacterial strain Ascusb_5403 encodes 16S rRNA
agagtttgatcctggctcaggatgaacgctagctacaggcttaacacatgcaagtcgaggggcagcgggaagtcagcttgctgactttgccggcgaccggcgcacgggtgagtaacgcgtatccaaccttccccttagtagcggatagcccggcgaaagtcggattaatacgctatgttcttcgtcgaggacatctgaagtgaagtaaagacatagtcgctaagg

SEQ ID NO: 2983 - DNA, 225 bp, Unknown
  bacterial strain Ascusb_3680 encodes 16S rRNA
agagtttgatcatggctcaggatgaacgctagcgacaggcctaacacatgcaagtcgagcggcagcacctcgggtggcgagcggcgcacgggtgagtaacgcgtatgtaacctgcccatgagtgggggatagcccggtgaaaaccggattaataccccatgacaccattgtctgacatcatttaatggttaaagattcattgctcatggatggacatgcgttgga

SEQ ID NO: 2984 - DNA, 225 bp, Unknown
  bacterial strain Ascusb_141 encodes 16S rRNA
agagtttgatcatggctcaggacgaacgctggcggcacgcttaacacatgcaagtcgaacggagataatttgagtttacttagattatcttagtggcggacgggtgagtaacacgtgagcaacctacctttgagagagggatagcttctggaaacggatggtaatacctcataacgtagttttaccgcatgataggactaccaaagatttatcactcaaagatgg

SEQ ID NO: 2985 - DNA, 225 bp, Unknown
  bacterial strain Ascusb_1691 encodes 16S rRNA
agagtttgatcatggctcaggacgaacgctggcggcgtgcctaacacatgcaagtcgaacggaactattttgacagatttcttcggaatgacggatttttagtttagtggcggacgggtgagtaacgcgtgagtaacctgcctctaagaggggaataacgttctgaaaagatcgctaataccgcataacatattgaagccgcatgactttgatatcaaagattta

SEQ ID NO: 2986 - DNA, 225 bp, Unknown
  bacterial strain Ascusb_4069 encodes 16S rRNA
agagtttgatcatggctcagaacgaacgctggcggcgcgttttaagcatgcaagtcgagcggcagcagcaatgcgagagcggcggacgggtgagtaacacgtgggtaatctgccctccggtcgggaatagcctgtggaaacacaggataataccggatgcgatggtccccgcacaagcgggggtcaggaaaggagccaaggctccgccggaggatgagcccgcgt

SEQ ID NO: 2987 - DNA, 225 bp, Unknown
  bacterial strain Ascusb_2904 encodes 16S rRNA
agagtttgatcctggctcaggatgaacgctggcggcgtgcctaatacatgcaagtcgagcgagaatctgatgattggagattcgtcaaagagaatcagaggaaagcggcggacgggtgagtaacgcgtaggcaacctgcccttagcagagggatagccattggaaacgatgattaaaacctcataatgctgtttgagcacatgctcagacagccaaagatttatc

SEQ ID NO: 2988 - DNA, 225 bp, Unknown
  bacterial strain Ascusb_3294 encodes 16S rRNA
agagtttgatcatggctcaggacgaacgctggcggcatgcctaacacatgcaagtcgaacgaggatagcaatatccgagtggcgaacgggtgagtaacacgtgagcaacctgccttacacaacgggatacctactggaaacagtagttaatacggtataagaccacagtaccgcatgatacagtggtaaaagatttatcggtgtaagatgggctcgcggcgcatt

SEQ ID NO: 2989 - DNA, 225 bp, Unknown
  bacterial strain Ascusb_2497 encodes 16S rRNA
agagtttgatcctggctcagaacgaacgctggcggcaggcttaacacatgcaagttgagcgggattggaaagtagcttgctactgaccatgagagcagcgcactggtgagtaacacgtgggaacataccttttggtgggggacaacagttggaaacgactgctaataccgcataagccctgagggggaaagatttattgccgaaagattggcccgcggaagatta

SEQ ID NO: 2990 - DNA, 225 bp, Unknown
  bacterial strain Ascusb_977 encodes 16S rRNA
agagtttgatcctggctcaggatgaacgctggcggcgtgcttaacacatgcaagtcgaacgaggaataattgatgaagttttcggatggatttagttattccgagtggcggacgggtgagtaacgcgtgggtaacctgccccatacagggggacaacagagggaaacttctgctaataccgcataagcggatcggatggcatcgtccggtccggaaagctccggc

SEQ ID NO: 2991 - DNA, 225 bp, Unknown
  bacterial strain Ascusb_11724 encodes 16S rRNA
agagtttgatcatggctcaggatgaacgctggcggcatgcctaagacatgcaagtcgaacgaggtggcccattgaagatggagtgcttgcacaaaatcggatttggattcccacctagtggcggacgggtgagtaacacgtaggtgatctacctttaagactgggataactattggaaacgatagctaataccggataacatattgattcgtttcaatattgaaa

SEQ ID NO: 2992 - DNA, 225 bp, Unknown
  bacterial strain Ascusb_1860 encodes 16S rRNA
agagtttgatcatggctcaggacgaacgctggcggcgtgcttaacacatgcaagtcgaacggagctaattccttcggggagaagcttagtggcggacgggtgagtaacgcgtgagcaatctgccttgcacagggggataacaactggaaacggttgctaataccgcataacgtaacggggaggcatctttctgttaccaaaggagcgatccggtgcaagatgagc

SEQ ID NO: 2993 - DNA, 225 bp, Unknown
  bacterial strain Ascusb_6705 encodes 16S rRNA
agagtttgatcctggctcaggatgaacgctagcgacaggcttaacacatgcaagtcgaggggcagcatgggcatagcaatatgcccgatggcgaccggcgcactggtgagtaacacgtatgcaacctgcctcctccagggggataatccagagaaatttggcctaataccccgtagtccgcgagagggcatcctctcgcgtggaaagctccggcgggaggagatg

SEQ ID NO: 2994 - DNA, 225 bp, Unknown
  bacterial strain Ascusb_5337 encodes 16S rRNA
agagtttgatcctggctcagaatgaacgctggcggcgtgcctaatacatgcaagtcgaacgaggtagcttcggctatctagtggcgaacgggtgagtaacacgtaggtaacctgcccttaagactgggatacccaggcgaaagcttggctaataccggataacaacattggaggcatctccgatgcttgaaaggcgcctttaaagcgccacttttggatggacct

SEQ ID NO: 2995 - DNA, 225 bp, Unknown
  bacterial strain Ascusb_1106 encodes 16S rRNA
agagtttgatcatggctcaggatgaacgctggcggcgtgcctaacacatgcaagtcgaacgaagcacttaccgtgatccttcgggtgaacggtctgtgactgagtggcggacgggtgagtaacgcgtgggtaacctgccctgtacagggggataacagccagaaatggctgctaataccgcataagcgcaggccgtggcatcatggtctgcggaaaactccggtg

SEQ ID NO: 2996 - DNA, 225 bp, Unknown
  bacterial strain Ascusb_9033 encodes 16S rRNA
agagtttgatcatggctcaggatgaacgctggcggcatgcctaagacatgcaagtcgaacgaagcggcccaatgaagatagagtgcttgcacaaagttggatttggattcccgcttagtggcgcaagggtgagtaacacgtgggtaatctaccttcgagtctggaataacagttagaaatgattgctaatgccggatgatatggaaaacgatacgtcattttgta

SEQ ID NO: 2997 - DNA, 225 bp, Unknown
  bacterial strain Ascusb_1342 encodes 16S rRNA
agagtttgatcatggctcaggacgaacgctggcggcgtgcctaacacatgcaagtcgaacggacgaggggagcttgctccccaagttagtggcggacgggtgagtaacacgtgagcaacctgcccttcggagggggacaacagctggaaacggctgctaataccgcatgacacagcggggaggcatctccttactgtcaaagattttatcgccgaaggatgggct

SEQ ID NO: 2998 - DNA, 225 bp, Unknown
  bacterial strain Ascusb_13653 encodes 16S rRNA
agagtttgatcctggctcaggatgaacgctagctacaggcttaacacatgcaagtcgaggggcagcatggtcaaagcttgctttgactgatggcgaccggcgcacgggtgagtaacgcgtatccaacctggcccatagtagggaatagcccggcgaaagtcggattaatgccctatgttgtatgaagaggacatctgattcttaccaaaggtttaccgctatggg

SEQ ID NO: 2999 - DNA, 225 bp, Unknown
  bacterial strain Ascusb_284 encodes 16S rRNA
agagtttgatcatggctcaggacgaacgctggcggcacgcttaacacatgcaagtcgaacggagaatatttgagtttacttagatattcttagtggcggacgggtgagtaacacgtgagcaacctaccttagagagagggatagcttctggaaacggatggtaatacctcataacataactgaaccgcatgatttagttatcaaagatttatcactctgagatgg

SEQ ID NO: 3000 - DNA, 225 bp, Unknown
  bacterial strain Ascusb_9832 encodes 16S rRNA
agagtttgatcctggctcaggatgaacgctggcggcatgcctaagacatgcaagtcgaacgaagaggccctttgaaattggagtgcttgcacaaagatggatttggattttctcttagtggcagacgggtgagtaacgcgtgggtaatctacctcaaagactgggataacttctggaaacggacgctaataccggataacacatatttagataactagatatgtt

SEQ ID NO: 3001 - DNA, 225 bp, Unknown
  bacterial strain Ascusb_4677 encodes 16S rRNA
agagtttgatcctggctcaggacaaacgctggcggcgtgcctaacacatgcaagtcgaacgaagcactgcggaaagagacttcggtcaattgaagctttgacttagtggcggacgggtgagtaatgcatgagcaacctgccctggagagggggacaacagctggaaacggctgctaataccgcatgaagttgcggggaggcatctctctgcaaccaaagatttat

SEQ ID NO: 3002 - DNA, 225 bp, Unknown
  bacterial strain Ascusb_877 encodes 16S rRNA
agagtttgatcatggctcaggatgaacgctagcggcaggcttaacacatgcaagtcgaggggcagcgcgaggtagcaatactttggcggcgaccggcggaagggtgcgtaacgcgtgagcaacatgcccgtatgagggggataagcgatggaaacgtcgtctaataccccgtaacacaggagatcgcatgatcatctgttgaaagattcatcgcatacggattgg

SEQ ID NO: 3003 - DNA, 225 bp, Unknown
  bacterial strain Ascusb_579 encodes 16S rRNA
agagtttgatcctggctcaggatgaacgctagctacaggcttaacacatgcaagtcgaggggcagcgagaagaaagcttgctttctttgtcggcgaccggcgcacgggtgagtaacgcgtatccaaccttccccttagtagaggatagcccggcgaaagtcggattaatactctatgttattcgttgaggacatctgaaatgaatcaaaggtttaccgctaaggg

SEQ ID NO: 3004 - DNA, 225 bp, Unknown
  bacterial strain Ascusb_4740 encodes 16S rRNA
agagtttgatcctggctcagaacgaacgctggcggcgcgtcttaagcatgcaagtcgagcgggattgagtagcttgctactcatgagagcggcggactggtgagtaacgcgtgggtgacgtaccctgaggatggggatagctcctagaaataggaggtaataccgaatacggtgtgcagggttagagactgtacatcaaaggttcttttgaaccgccacaggagc

SEQ ID NO: 3005 - DNA, 225 bp, Unknown
  bacterial strain Ascusb_189 encodes 16S rRNA
agagtttgatcatggctcaggatgaacgctagctacaggcttaacacatgcaagtcgaggggcagcatgaagtttgcttgcaaactttgatggcgaccggcgcacgggtgagtaacgcgtatccaaccttccccttagtagggcatagcccggcgaaagtcggattaataccctatgttgtatgaagaggacatctgacttataccaaagatttatcgctaaggg

SEQ ID NO: 3006 - DNA, 225 bp, Unknown
  bacterial strain Ascusb_6247 encodes 16S rRNA
agagtttgatcctggctcaggatgaacgctggcggcatgcctaatacatgcaagtcgaacggaccacttcggtggtcagtggcgaacgggtgagtaacacatgaacaacctgcccctatgactgggataacgtcttgaaaaggacgctaataccggataggcagtgacctggcatcaggacactgttaaagatgggctacatcgcaaagggatgggttcatgtcg

SEQ ID NO: 3007 - DNA, 225 bp, Unknown
  bacterial strain Ascusb_3281 encodes 16S rRNA
agagtttgatcctggctcaggatgaatgctggcggcgtgcctaatacatgcaagtcgagcggtaacagggattcaccgtgttcttgacgcacttggccatagagcaagtagctgatttcgagagcacagtgaatctgctgacgagcggcggacggctgagtaacgcgtgggaacggaccccaaactgagggataactagtcgaaagattagctaataccgcatat

SEQ ID NO: 3008 - DNA, 225 bp, Unknown
  bacterial strain Ascusb_1574 encodes 16S rRNA
agagtttgatcatggctcagagtgaacgctggcggcgtggttaagacatgcaagtcgaacgggatttgatcgaccgcaaggaagattgatgagagtggcaaacgggtgcgtaacacgtaaacaacttgccctttagttggggatagcttgccgaaaggtgaattaataccgaatgtggaggatttccgcatgggaatttttctaaaatttgtaatgatgctaagg

SEQ ID NO: 3009 - DNA, 225 bp, Unknown
  bacterial strain Ascusb_662 encodes 16S rRNA
agagtttgatcatggctcaggattaacgctggcggcgtgcctaacacatgcaagtcgaacggaatatcttcggatatttagtggcgaacgggtgagtaatgtacaggtaatgtaccttcgtactgcgaataacaagctgaaaagtttgctaatacggaatagtttccttcgagggcatccttaaaggaataaagatttatcgtgcggagatcagcctgtatccta

SEQ ID NO: 3010 - DNA, 225 bp, Unknown
  bacterial strain Ascusb_2027 encodes 16S rRNA
agagtttgatcatggctcaggatgaacgctagctacaggcttaacacatgcaagtcgaggggcagcatgagattagcttgctaatcttgatggcgaccggcgcacgggtgagtaacgcgtatccaaccttccccctactcaggcatagcccggtgaaaaccggattaactcctgatagtttcactagatggcatctgacggtgaataaagctcagcggtaaggga

SEQ ID NO: 3011 - DNA, 225 bp, Unknown
  bacterial strain Ascusb_1405 encodes 16S rRNA
agagtttgatcatggctcaggatgaacgctggcggcgtgcataacacattcaagtcgaacggtgaaatgccttcgggcatggatcagtggcggacgggtgagtaacgcgtgagcaacctgccatacagtgggggataacacagggaaacttgtgctaataccgcatgacacatcgggaccgcatgattctgatgtcaaagagcaattgctgtatgatgggctcgc

SEQ ID NO: 3012 - DNA, 225 bp, Unknown
  bacterial strain Ascusb_424 encodes 16S rRNA
agagtttgatcatggctcaggatgaacgctggcggcgtgcctaacacatgcaagtcgaacggggttactggcagcggagatttcggtcaaagcagcctttaacctagtggcggacgggtgagtaacgcgtggggaacctgccctgtactgggggataacagtgagaaatcactgctaataccgcataagcgcacagcatcgcatgatgcagtgtgaaaaactgag

SEQ ID NO: 3013 - DNA, 225 bp, Unknown
  bacterial strain Ascusb_2490 encodes 16S rRNA
agagtttgatcatggctcaggacgaacgctggcggcgtgcttaacacatgcaagtcgaacggacggacacccttcggggtgcgagttagtggcggacgggtgagtaacgcgtgagtaacctgccttggagtggggaataacacagggaaacttgtgctaataccgcataacatcatgagatggcatcttcttatgatcaaagatttattgctccaagatgggctc

SEQ ID NO: 3014 - DNA, 225 bp, Unknown
  bacterial strain Ascusb_3947 encodes 16S rRNA
agagtttgatcatggctcaggacgaacgctggcggcgtgcttaacacatgcaagtcgaacggggataacggagaggagagcttcggcaggaatcactgttattcgagtggcggacgggtgagtaacgcgtgaacaatctgtcccagacagggggataacacttggaaacaggtgctaataccgcataagaccacagcatcgcatggtgcaggggtaaaaggagcg

SEQ ID NO: 3015 - DNA, 225 bp, Unknown
  bacterial strain Ascusb_8701 encodes 16S rRNA
agagtttgatcatggctcagaacgaacgctggcggcgcgtcttaagcatgcaagtcgagcggtaagttatagcttgctataacctagagcggcggactggtgagtaacgcgtgggtgacgtaccttcgtgacggggacagctcctagaaataggagataataccggatacgctgtatgttgtcagaggacatacaggaaaggatcttttgattcgcacgaagagc

SEQ ID NO: 3016 - DNA, 225 bp, Unknown
  bacterial strain Ascusb_198 encodes 16S rRNA
agagtttgatcatggctcaggatgaacgctagctacaggcttaacacatgcaagtcgaggggcatcgagaggaaagcttgctttccttgtcggcgaccggcgcacgggtgagtaacgcgtatccaaccttccccttagtagggcatagcccggcgaaagtcggattaataccctatgttttccgatgaggacatctgagctggaacaaagatttatcgctaaggg

SEQ ID NO: 3017 - DNA, 225 bp, Unknown
  bacterial strain Ascusb_1829 encodes 16S rRNA
agagtttgatcatggctcaggatgaacgctagctacaggcttaacacatgcaagtcgcggggcagcatggagtttgcttgcaaactttgatggcgaccggcgcacgggtgagtaacgcgtatccaaccttccccttagtagggcatagcccggcgaaagtcggattaataccctatgttcttcgtagaggacatctgaaatgaagcaaaggtttaccgctaaggg

SEQ ID NO: 3018 - DNA, 225 bp, Unknown
  bacterial strain Ascusb_3024 encodes 16S rRNA
agagtttgatcctggctcaggacgaacgctggcggcgtgcctaacacatgcaagtcgagcggagttatagattggaaagcttcggccggaagatgtataacttagcggcggacgggtgagtaacgcgtgagcaacctgtcctctacagggggataagacagcgaaagttgttctaataccgcataagaccacattgccacatggcggaggggtcaaaggagcaat

SEQ ID NO: 3019 - DNA, 225 bp, Unknown
  bacterial strain Ascusb_112 encodes 16S rRNA
agagtttgatcctggctcaggataaacgctggcggcgcacataagacatgcaagtcgaacggacttaattcgttagtttactaatggaagcggttagtggcggactggtgagtaacgcgtaagcaacctgcctattagtagggaataacagtgagaaatcattgctaataccgtataagctggaaacatcgcatgatgtagtcagaaaaggagcaattcgctaat

SEQ ID NO: 3020 - DNA, 225 bp, Unknown
  bacterial strain Ascusb_3860 encodes 16S rRNA
agagtttgatcctggctcaggacgaacgctggcggcgtgcctaacacatgcaagtcgaacggagtgatttcacgaaggtcttcggattggacgagatcacttagtggcggacgggtgagtaacgcgtgagcaacctgcctttcagagggggacaacggttggaaacgaccgctaataccgcataaaacattctggtcgcatgatcgggatgtcaaagattttatc

SEQ ID NO: 3021 - DNA, 225 bp, Unknown
  bacterial strain Ascusb_20688 encodes 16S rRNA
agagtttgatcatggctcaggattaacgctggcggcgtgcctaatacatgcaagtcgaatggtagcaataccatggcgaacgggtgagtaacacgtaggtaacctgtctttaagatgaggataaccgttggaaacgacggataatactcgataggtaattttagggcatcctaggattattaaagatttatcacttagagaggggcctgcggcgcattagctaga

SEQ ID NO: 3022 - DNA, 225 bp, Unknown
  bacterial strain Ascusb_6094 encodes 16S rRNA
agagtttgatcctggctcaggatgaacgctagctacaggcttaacacatgcaagtcgaggggcagcatgacgattgcttgcaattgttgatggcgaccggcgcacgggtgagtaacgcgtatccaaccttccccatagtagaggatagcccggcgaaagtcggattaatactctatgttgtataacgaggacatctgaattataccaaagatttatcgctatggg

SEQ ID NO: 3023 - DNA, 225 bp, Unknown
  bacterial strain Ascusb_14648 encodes 16S rRNA
aagtttgatcatggctcaggatgaacgctagctacaggcttaacacatgcaagtcgaggggtaacgacagcgaaagcttgcttttgctgggcgacgaccggcgaatgggtgagtaacgcgtatccaacctgccgcaaagtagggcacagccttgcgaaagtaagattaatgccctatgtgctgtgatgatgacatcagaattgcagtaaaggttcaccgctttgc

SEQ ID NO: 3024 - DNA, 225 bp, Unknown
  bacterial strain Ascusb_5179 encodes 16S rRNA
agagtttgatcatggctcaggatgaacgctagctacaggcttaacacatgcaagtcgaggggcatcatgaagtttgcttgcaaactttgatggcgaccggcgcacgggtgagtaacgcgtatccaacctggcctatagtaggggatagcccggcgaaagtcggattaataccctatgttttccattgcgggcatctaatttggaacaaagattgatcgctatagg

SEQ ID NO: 3025 - DNA, 225 bp, Unknown
  bacterial strain Ascusb_2466 encodes 16S rRNA
agagtttgatcatggctcaggatgaacgctagctacaggcttaacacatgcaagtcgaggggcagcatggtcttagcttgctaagactgatggcgaccggcgcacgggtgagtaacgcgtatccaaccttccccatagtagggaatagcccggcgaaagtcggattaatgccctatgttcttcaatgcagacatctaggttgaagcaaagattcatcgctatggg

SEQ ID NO: 3026 - DNA, 225 bp, Unknown
  bacterial strain Ascusb_1584 encodes 16S rRNA
agagtttgatcatggctcaggatgaacgctggcggcgtgcttaacacatgcaagtcgaacggagtattgacgctgaacaaacgattagcttgctaaaagtgagttcttgttgatacttagtggcggacgggtgagtaacgcgtgggtaacctgccatgtacagggggataacacttagaaataggtgctaataccgcataagcctacaggatcgcatgatccagt

SEQ ID NO: 3027 - DNA, 225 bp, Unknown
  bacterial strain Ascusb_534 encodes 16S rRNA
agagtttgatcatggctcagaacgaacgctggtggcgtgtcttatacatgcaagtcgagcggggcagcaatgcccagcggcgaacgggtgagtaacgcgtaagcaatctgccccatatcaggaaatacccgtgccaacgcgcggttaatgtccaggagcgtggcttcccgcatgggaagttgacaagagatttatcggtatgggatgagcttgcgtccgattagc

SEQ ID NO: 3028 - DNA, 225 bp, Unknown
  bacterial strain Ascusb_143 encodes 16S rRNA
agagtttgatcatggctcaggacgaacgctggcggcacgcttaacacatgcaagtcgaacggagttatttggagcttgctttgaataacttagtggcggacgggtgagtaacacgtgagcaatctgcccttaagagggggatagcagttagaaatgactgataataccgcataagatagtagtaccgcatggtacagctataaaagattttatcgcttaaggatg

SEQ ID NO: 3029 - DNA, 225 bp, Unknown
  bacterial strain Ascusb_5543 encodes 16S rRNA
agagtttgatcctggctcaggatgaacgctagctacaggcttaacacatgcaagtcgaggggcagcattgagatagcttgctatttcagatggcgaccggcgcacgggtgagtaacgcgtatccaaccttccctatagtagagaatagcccggcgaaagtcggattaatgctctatgttttccaatgcggacatctaaaatggaacaaaggtttaccgctatagg

SEQ ID NO: 3030 - DNA, 225 bp, Unknown
  bacterial strain Ascusb_2254 encodes 16S rRNA
agagtttgatcatggctcaggatgaacgctagcgacaggcctaacacatgcaagtcgaggggcagcgcggggaaagcttgcttttcctggcggcgaccggcgcacgggtgcgtaacaggtgtgcaatctgtccatagtcggggaatagcccagcgaaagttggattaaagctccatgtgagtgaacgccgcatgacgatcacttgaaacgtaaggactatgggtg

SEQ ID NO: 3031 - DNA, 225 bp, Unknown
  bacterial strain Ascusb_498 encodes 16S rRNA
agagtttgatcctggctcaggatgaacgctggcggcgtgcttaacacatgcaagtcgaacgaagcattggttttgaagttttcggacggaaaagcctttgacttagtggcggacgggtgagtaacgcgtgggcaacctgccgtatgcagggggacaacagttggaaacgactgctaataccgcataagcgcacggggacgcatgttcctgtgtgaaaagccttaa

SEQ ID NO: 3032 - DNA, 225 bp, Unknown
  bacterial strain Ascusb_9049 encodes 16S rRNA
agagtttgatcctggctcaggatgaacgctagctacaggcttaacacatgcaagtcgaggggcagcatgaagtcagcttgctgactttgatggcgaccggcgcacgggtgcgtaacacgtatccaatctacccatggctcagggatagccttgcgaaagtaagattaatacctgatggtcttgatttccggcatcgggattcaagtaaagattcatcggcgatgg

SEQ ID NO: 3033 - DNA, 225 bp, Unknown
  bacterial strain Ascusb_2865 encodes 16S rRNA
agagtttgatcatggctcaggacgaacgctggcggcgtgcctaacacatgcaagtcgaacggactgattcgcttcggtgatgaaagtcagtggcggacgggtgagtaacgcgtgagtaacctgccttacagagggggataacgtttggaaacgaacgctaataccgcataacatatatttgtcgcatggcagatatatcaaaggagcaatccgctgtaagatgga

SEQ ID NO: 3034 - DNA, 225 bp, Unknown
  bacterial strain Ascusb_5156 encodes 16S rRNA
agagtttgatcatggctcaggatgaacgctagcggcaggcttaacacatgcaagtcgaggggcagcgggtgtagcaatacatgccggcgaccggcgcaagggtgcgtaacgcgtgagcgacatgcccgtgaccgggggataaccgatggaaacgtcgcctaaccccccatacgccgagggatcgcatggtcccttgttgaaaacgtcagtggtcacggattggct

SEQ ID NO: 3035 - DNA, 225 bp, Unknown
  bacterial strain Ascusb_1985 encodes 16S rRNA
agagtttgatcctggctcaggatgaacgctagctacaggcttaacacatgcaagtcgaggggtaacattggctgagcttgctcagccagatgacgaccggcgcacgggtgagtaacgcgtatccaacctgcccatgggtcaggaataaactcccgaaagggagcctaatacctgatgttgtgagaagaaggcctctgattttcacgaaagacttcggttgccgat

SEQ ID NO: 3036 - DNA, 225 bp, Unknown
  bacterial strain Ascusb_11416 encodes 16S rRNA
agagtttgatcctggctcagaacgaacgctggcggcgcgtcttaagcatgcaagtcggacggcaaggggagcttgctccccctagagtggcggactggtgagtaacacgtgggtgacgtaccctttagctggggatagccggtagaaataccgggtaataccgaataagcttgcccttttgatgtagggtaaggaaaggagcttcggcttcactgaaggaacggc

SEQ ID NO: 3037 - DNA, 225 bp, Unknown
  bacterial strain Ascusb_2164 encodes 16S rRNA
agagtttgatcatggctcagaacgaacgctggcggcgcgtcttaagcatgcaagtcggacggcaaggggagcttgctccccctagagtggcggactggtgagtaacacgtgggtgacgtaccctttagctggggatagccggtagaaataccgggtaataccgaataagcttgcccttttaatgtagggtaaggaaaggagcttcggcttcactgaaggaacggc

SEQ ID NO: 3038 - DNA, 225 bp, Unknown
  bacterial strain Ascusb_1067 encodes 16S rRNA
agagtttgatcatggctcaggacgaacgctggcggcatgcctaacacatgcaagtcgaacggagttaagagaagcttgcttttcttaacttagtggcggacgggtgagtaacgcgtgagcaatctgcctttcagtggggaataatgttctgaaaagagcactaataccgcataatgtacagtgaccgcatgatcgttgtaccaaagatttatcgctgagagatga

SEQ ID NO: 3039 - DNA, 225 bp, Unknown
  bacterial strain Ascusb_4613 encodes 16S rRNA
agagtttgatcatggctcaggatgaacgctggcggcgtgcctaatacatgcaagtcgaacggagatgccttttcagaagccttcgggcggacgagttggtattcttagtggcggacgggtgagtaacacgtgagcaacctgcctttcagagggggataacggctggaaacggtcgctaataccgcatgatataccgaagtggcatcgctttggtatcaaaggagc

SEQ ID NO: 3040 - DNA, 225 bp, Unknown
  bacterial strain Ascusb_7126 encodes 16S rRNA
agagtttgatcatggctcaggataaacgctggcggcgcacataagacatgcaagtcgaacggaagccgttttaaattaattgattggatatgagaacttgttcaatttgaagagattttaatttaaaacatatgactttagtggcggactggtgagtaacgcgtaagcaatctgcctatcagaggggaataacagcgagaaatcgttgctaataccgcatatgct

SEQ ID NO: 3041 - DNA, 225 bp, Unknown
  bacterial strain Ascusb_1683 encodes 16S rRNA
agagtttgatcatggctcaggatgaacgctggcggcgtgcctaacacatgcaagtcgaacggacaagggggcttcggcctcattgttagtggcggacgggtgagtaacgcgtggagaacctgccctgtactgggggataacagtgggaaaccactgctaataccgcatacgctctagaggccgcatggccattagaggaaaactccggtggtataggatggctcc

SEQ ID NO: 3042 - DNA, 225 bp, Unknown
  bacterial strain Ascusb_11390 encodes 16S rRNA
agagtttgatcatggctcaggatgaacgctagctacaggcttaacacatgcaagtcgaggggcagcatgacgattgcttgcaattgtcgatggcgaccggcgcacgggtgagtaacgcgtatccaaccttccccttagtagaggatagcccggcgaaagtcggattaatactctatgttcttcgaagcgggcatctaatttgaagcaaagattgatcgctaaggg

SEQ ID NO: 3043 - DNA, 225 bp, Unknown
  bacterial strain Ascusb_1994 encodes 16S rRNA
agagtttgatcatggctcaggatgaacgctggcggcgtgcctaatacatgcaagtcgagcgagaatcgaatgaacggagattcgtcaaagtgaattcgaggaaagcggcggacgggtgagtaacgcgtaggcaacctgcccttagcagagggatagccattggaaacgatgattaaaacctcataatgctgcagaaacacatgtttttacagccaaagatttatc

SEQ ID NO: 3044 - DNA, 225 bp, Unknown
  bacterial strain Ascusb_2360 encodes 16S rRNA
agagtttgatcctggctcaggatgaacgctggcggcgtgcctaacacatgcaagtcgaacgggactgtttagtgacgatttcggtctgaactttacagtttagtggcggacgggtgagtaacgcgtggataacctgcctttcacagggggatagcagctggaaacggctggtaataccgcatacgctcatgtcaccgcatggtgatgtgaggaaagacttatcgg

SEQ ID NO: 3045 - DNA, 225 bp, Unknown
  bacterial strain Ascusb_4364 encodes 16S rRNA
agagtttgatcatggctcaggacgaacgctggcggcgtgcctaacacatgcaagtcgagcggagacatagggcggaaagcttcggctggaagacttatgttttagcggcggacgggtgagtaacgcgtgagcaatctgtccttcacagggggataagataccgaaaggtgttctaataccgcataagaccacagcaccgcatggtgtgggggtcaaaggagagat

SEQ ID NO: 3046 - DNA, 225 bp, Unknown
  bacterial strain Ascusb_4460 encodes 16S rRNA
agagtttgatcatggctcaggacgaacgctggcggcgtgcttaacacatgcaagtcgaacggagttagacgctggtttgatgctagcttgctagtggatttccttgtctaacttagtggcggacgggtgagtaacgcgtgagtaacctgcctctcagtggggaataacgccctgaaaagagcgctaataccgcataacgtattctgaccgcatgatcgggatacc

SEQ ID NO: 3047 - DNA, 225 bp, Unknown
  bacterial strain Ascusb_2556 encodes 16S rRNA
agagtttgatcatggctcaggacgaacgctggcggcacgcttaacacatgcaagtcgaacggtgacggtttcaagcttgcttgaaacttgatcagtggcggacgggtgagtaacacgtgagcaatctgcctctaagtggggaataacgactggaaacggtcggtaataccgcataacatagccgaaccgcatgatttggttatcaaagatttatcgcttagagat

SEQ ID NO: 3048 - DNA, 225 bp, Unknown
  bacterial strain Ascusb_891 encodes 16S rRNA
agagtttgatcatggctcaggacgaacgctggcggcgtgcctaacacatgcaagtcgaacggagcgaaagcagcttgctgctggagcttagtggcggacgggtgagtaacacgtgagtaacctgcctttcagaggggaataatgtctggaaacggacactaataccgcataatatattgggatcgcatgattttgatatcaaaggagcaatccgctgaaagatgg

SEQ ID NO: 3049 - DNA, 225 bp, Unknown
  bacterial strain Ascusb_2177 encodes 16S rRNA
agagtttgatcatggctcaggatgaacgctagcggcaggcttaacacatgcaagtcgaggggtaacgcggagtagcaatactctggcgacgaccggcgcacgggtgcgtaacgcgtatgcaacctaccttgtacagggggataacggagtgaaaattccactaatatcccatggtgttgttggttcgcatggactgacaactaaagcttcggtggtacaagatgg

SEQ ID NO: 3050 - DNA, 225 bp, Unknown
  bacterial strain Ascusb_1603 encodes 16S rRNA
agagtttgatcctggctcagaacgaacgctggcggcgcgtcttaagcatgcaagtcgagcggtaaggaagaagcttgcttcttccctagagcggcggactggtgagtaacgcgtgggtgacgtacctttgtgacggggacagctcctagaaataggagataataccggatacgctgtatgttgtcagagggcatacaggaaaggatcttttgattcgcacagaga

SEQ ID NO: 3051 - DNA, 225 bp, Unknown
  bacterial strain Ascusb_620 encodes 16S rRNA
agagtttgatcctggctcaggatgaacgctggcggcgtgcttaacacatgcaagtcgaacggagttatatttttgaagttttcggatggatgagatataacttagtggcggacgggtgagtaacgcgtggggaacctgccccataccgggggacaacagttggaaacgactgctaataccgcataagcgcacggaaggacatccttcagtgtgaaaaactccggt

SEQ ID NO: 3052 - DNA, 225 bp, Unknown
  bacterial strain Ascusb_754 encodes 16S rRNA
agagtttgatcatggctcaggacgaacgctggcggcacgcttaacacatgcaagtcgaacggagctatttgagcttgcttagatagcttagtggcggacgggtgagtaacacgtgagcaatctgcctttcagagggggatagcagttggaaacgactgataataccgcataacataacgagaccgcatgatcttgttatcaaagatttatcgctgaaagatgagc

SEQ ID NO: 3053 - DNA, 225 bp, Unknown
  bacterial strain Ascusb_3534 encodes 16S rRNA
agagtttgatcatggctcaggatgaacgctagcgacaggcctaacacatgcaagtcgagcggcagcacctcgggtggcgagcggcgcacgggtgagtaacgcgtatgtaacctgcccatgagtggggaatagcccggtgaaaaccggattaatgccccatgacaccattgtctgacatcatttaatggttaaagattcattgctcatggatggacatgcgttgga

SEQ ID NO: 3054 - DNA, 225 bp, Unknown
  bacterial strain Ascusb_889 encodes 16S rRNA
agagtttgatcatggctcaggacgaacgctggcggcgtgcctaacacatgcaagtcgaacggagttcttgtggaagtccttcggggcggaagcttggacttagtggcgaacgggtgagtaacgcgtgagcaacctgcctttcagagggggacaacggttggaaacgaccgctaataccgcataatgcagctggaccgcatgatccggctgccaaagatttatcgc

SEQ ID NO: 3055 - DNA, 225 bp, Unknown
  bacterial strain Ascusb_7965 encodes 16S rRNA
agagtttgatcctggctcaggatgaacgctggcggcgtgcctaatacatgcaagtcgaacgggtgcagcaatgtactagtggcgaacgggtgagtaacacgttggtgacctgccccaaagatgggaatatcacctggaaacgggtggcaaaaccgaataagcttatcttagttagagaaaggtaagtaaaagcgaaagctactttgggaggggcctgcggcccat

SEQ ID NO: 3056 - DNA, 225 bp, Unknown
  bacterial strain Ascusb_816 encodes 16S rRNA
agagtttgatcatggctcaggacgaacgctggcggcatgcctaacacatgcaagtcgaacggagttttgaggagcttgctccttaaaacttagtggcggacgggtgagtaacgcgtgagcaacctgcctttcagtggggaataatgttttgaaaagaacactaataccgcataatgtatagagatcgcatgatttttgtaccaaaggatttattcgctgagagat

SEQ ID NO: 3057 - DNA, 225 bp, Unknown
  bacterial strain Ascusb_9365 encodes 16S rRNA
agagtttgatcctggctcaggatgaacgctggcggcatgcctaagacatgcaagtcgaacgagacgacccattgaagattgcgagcttgctcaaagtccgatttggattcttcgtctagtggcgcaagggtgagtaacacgtgggtaatctgcctttaagtctggaataacagttagaaatgattgctaatgccggatgatatatgaaacgatacgtcatttcat

SEQ ID NO: 3058 - DNA, 225 bp, Unknown
  bacterial strain Ascusb_5231 encodes 16S rRNA
agagtttgatcatggctcaggatgaatgctggcggcgtgcctaatacatgcaagtcgagcggtaacagggcttcaccgtttccttgacactccgggctgaatgcgggaggttgaattcgagggaacagtgaagctgctgacgagcggcggacggctgagtaacgcgtgggaacggaccccaaagtgagggataactactcgaaagagtggctaataccgcatgtg

SEQ ID NO: 3059 - DNA, 225 bp, Unknown
  bacterial strain Ascusb_6331 encodes 16S rRNA
agagtttgatcatggctcaggatgaacgctggcggcatgcttaacacatgcaagtcgaacggacaatcacccttcggggtgtgcgttagtggcggacgggtgagtaacgcgtgaggaacctgccttgcagtggggaataacagccggaaacgactgctaataccgcatgatgcatcgttgtcgcatggcaatgatgccaaagatttatcgctgtgagatggcctc

SEQ ID NO: 3060 - DNA, 225 bp, Unknown
  bacterial strain Ascusb_6161 encodes 16S rRNA
agagtttgatcatggctcaggacgaacgctggcggcgtgcctaacacatgcaagtcgagcggagatatgaggaacggaggcttcggcggaagggaatcatattttagcggcggacgggtgagtaacgcgtgagcaatctgtccctgacagggggataacacttggaaacaggtgctaataccgcataagaccacgaggcggcatcgccttggggtaaaaggagcg

SEQ ID NO: 3061 - DNA, 225 bp, Unknown
  bacterial strain Ascusb_1913 encodes 16S rRNA
agagtttgatcatggctcagaacgaacgctggcggcatggattaggcatgcaagtcgaacgggagcagcaatgctccagtggcgcaagggtgaggaacacgtgaacaacctgccttcgagatggggatagcttctggaaacgggagataataccgaataacatcaactggtcgcatgactggttgatcaaagcagcaatgcgcttgaagaggggttcgcgtccca

SEQ ID NO: 3062 - DNA, 225 bp, Unknown
  bacterial strain Ascusb_7105 encodes 16S rRNA
agagtttgatcatggctcaggacgaacgctggcggcgtgcttaacacatgcaagtcgaacgaagcttgattttggaatctttcgggatgaagaatgatatgacttagtggcggacgggtgagtaacgcgtgagtaacctgcctttcagagtggaataacgtttggaaacgaacgctaataccgcataacatcaatttatcgcatggtagaatgatcaaagattta

SEQ ID NO: 3063 - DNA, 225 bp, Unknown
  bacterial strain Ascusb_347 encodes 16S rRNA
agagtttgatcctggctcaggatgaacgctggcggcgtgcttaacacatgcaagtcgaacggagcttagaaggaagcttgctttcatttaagcttagtggcggacgggtgagtaacgcgtgagcaacctgccctcgagtggggaataacatcgagaaatcggtgctaataccgcataaagtcgagagaccgcatgatctttcgaccaaaggatttattcgcttga

SEQ ID NO: 3064 - DNA, 225 bp, Unknown
  bacterial strain Ascusb_11260 encodes 16S rRNA
agagtttgatcatggctcaggataaacgctggcggcgcacataagacatgcaagtcgaacggaagtcgtcataatgattccaatattgatatgaagatttatctgatttgaaattgaagatgacttatgacaatggctttagtggcggactggtgagtaacgcgtaagcaatctgcctattagaggggaataacagtgagaaatcattgctaataccgcatatgc

SEQ ID NO: 3065 - DNA, 225 bp, Unknown
  bacterial strain Ascusb_6575 encodes 16S rRNA
agagtttgatcctggctcaggatgaacgctggcggcgtgcctaacacatgcaagtcgaacgggactgttaggaagatcttttcggagtgattccttacagtttagtggcggacgggtgagtaacgcgtggataacctgcctttcacagggggatagcagctggaaacggctggtaataccgcatacgctcagagcaccgcatgatgctttgaggaaagatttatc

SEQ ID NO: 3066 - DNA, 225 bp, Unknown
  bacterial strain Ascusb_2050 encodes 16S rRNA
agagtttgatcctggctcaggatgaacgctggcggcgtgcctaacacatgcaagtcgagcggagtcatatgttgattcttcggatgatttatatgacttagcggcggatgggtgagtaacacgtgggtaatctgccctgcactgggggataacagttggaaacgactgttaataccgcatatgcacacgtggccgcatggccgtgggtggaaagattcatcggtg

SEQ ID NO: 3067 - DNA, 225 bp, Unknown
  bacterial strain Ascusb_11232 encodes 16S rRNA
agagtttgatcctggctcaggatgaacgctagcggcaggcttaacacatgcaagtcgaggggcagcggggagtagcaatactccgccggcgaccggcgcaagggtgcgtaacgcgtgagcaacatgcccgtcacagggggataatccatggaaacgtggtctaaaaccgcatagattgcagagtggacatccactttgcaagaaattcgcaagaaggtgacggat

SEQ ID NO: 3068 - DNA, 225 bp, Unknown
  bacterial strain Ascusb_3882 encodes 16S rRNA
agagtttgatcctggctcaggatgaacgctagcggcaggcttaacacatgcaagtcgaggggcagcaggcggtagcaatactgtgctggcgaccggcgcacgggtgcgtaacgcgtatgcaacctacccactacagggggataacggagggaaacttccactaatatcccatggtgtcaccgaatcgcatggtttggtgactaaagctacggtggtagtggatgg

SEQ ID NO: 3069 - DNA, 225 bp, Unknown
  bacterial strain Ascusb_2201 encodes 16S rRNA
agagtttgatcatggctcaggacgaacgctggcggcgtgcctaacacatgcaagtcgaacgaagctcctgattggattcttcggatgaagagaaggaagacttagtggcggacgggtgagtaacgcgtgagcaacctgcctttcagagggggataacagttggaaacgactgctaataccgcataacatatagatgtcgcatggcatttgtatcaaagctgaggc

SEQ ID NO: 3070 - DNA, 225 bp, Unknown
  bacterial strain Ascusb_1536 encodes 16S rRNA
agagtttgatcctggctcaggacgaacgctggcggcacgcttaacacatgcaagtcgaacggtgaatcggagcttgctttgattcatagtggcggacgggtgagtaacacgtgagtaacctgcctctgtgtggggaatagcttctggaaacggatggtaataccgcataacatatatgtatcgcatggtatatatatcaaagatttatcgcacagagatggactc

SEQ ID NO: 3071 - DNA, 225 bp, Unknown
  bacterial strain Ascusb_154 encodes 16S rRNA
agagtttgatcctggctcaggatgaacgctagctacaggcttaacacatgcaagtcgaggggcagcatggcggaagcttgcttccgctgatggcgaccggcgcacgggtgagtaacgcgtatccaaccttccccctagcagggcatagcccgtagaaatgcggattaacaccctatgttgtgttttgaggacatctgacgaacactaaaggtttaccgctagggg

SEQ ID NO: 3072 - DNA, 225 bp, Unknown
  bacterial strain Ascusb_3436 encodes 16S rRNA
agagtttgatcctggctcaggacgaacgctggcggcgtgcttaacacatgcaagtcgaacgaagcttgattacagatttcttcggaatgacgtatgatatgactgagtggcggacgggtgagtaacgcgtgagcaacctgcccttaggtgagggatagtgtctggaaacggacagtaatacctcataacatatatttgcggcatcgcagatatatcaaaggttta

SEQ ID NO: 3073 - DNA, 225 bp, Unknown
  bacterial strain Ascusb_2103 encodes 16S rRNA
agagtttgatcctggctcaggatgaacgctagcggcaggcttaacacatgcaagtcgaggggcagcgcggggtagcaatactctggcggcgaccggcggaagggtgcgtaacgcgtgagcaacatgcccgtggcagggggataagcgatggaaacgtcgtctaagaccccgtaacaacagacctcgcatggggtttgtttgaaagcttcggcggccacggattgg

SEQ ID NO: 3074 - DNA, 225 bp, Unknown
  bacterial strain Ascusb_961 encodes 16S rRNA
agagtttgatcatggctcaggatgaacgctggcggcgtgcttaacacatgcaagtcgaacgaagcactggttttgaagttttcggacggaaaagcctttgacttagtggcggacgggtgagtaacgcgtgggcaacctgccgtatgcagggggacaacagttggaaacgactgctaataccgcataagcgcacggggacgcatgttcctgtgtgaaaagccttga

SEQ ID NO: 3075 - DNA, 225 bp, Unknown
  bacterial strain Ascusb_4659 encodes 16S rRNA
agagtttgatcatggctcaggatgaacgctagcgacaggcctaacacatgcaagtcgaggggcagcatggtcaaagcttgctttgactgatggcgaccggcgcacgggtgcgtaacaggtatgcaacctgtccttaaccaagggatagcccgctgaaaggcggattaacactttatgtgtcacgtgagggcatcctcgtgtgatgaaacgcaagggttaaggttg

SEQ ID NO: 3076 - DNA, 225 bp, Unknown
  bacterial strain Ascusb_5053 encodes 16S rRNA
agagtttgatcatggctcaggacgaacgctggcggcacgcttaacacatgcaagtcgaacggagttattcggagcttgctctggataacttagtggcggacgggtgagtaacacgtgagcaacctgcctttgagagtgggatagcttctggaaacggatggtaataccgcataacattacggaaccgcatgattctgtaatcaaagatttatcgctcaaagatgg

SEQ ID NO: 3077 - DNA, 225 bp, Unknown
  bacterial strain Ascusb_1954 encodes 16S rRNA
agagtttgatcctggctcaggatgaacgctggcggcgtgcctaacacatgcaagtcgagcggagttaagttttcggatttaacttagcggcggatgggtgagtaacacgtgggtaacctgccctgcacagggggataacagttggaaacgactgttaataccgcatatgcacacgatgccgcatggcaaagggtggaaagatttatcggtgcaggatgggcccgc

SEQ ID NO: 3078 - DNA, 225 bp, Unknown
  bacterial strain Ascusb_6255 encodes 16S rRNA
agagtttgatcatggctcaggatgaacgctggcggcgtgcttaacacatgcaagtcgaacggaactgctttgaaagatttccttcggggatgacttcgttgtagtttagtggcggacgggtgagtaacgcgtgagtaacctgcccttgagagggggataacgttctgaaaagaacgctaataccgcataatactattgaatcgcatggtttaatagtcaaaactc

SEQ ID NO: 3079 - DNA, 225 bp, Unknown
  bacterial strain Ascusb_5742 encodes 16S rRNA
agagtttgatcctggctcaggatgaacgctggcggcgtgcctaacacatgcaagtcgaacggagcatagacgctgtgagaagaatcagcttgctgaggaagcgaacttgtttatgcttagtggcggacgggtgagtaacgcgtggataacctggctcacacagggggatagcagttggaaacgactgataataccgcataagcgcacggcatcgcatgatgcagt

SEQ ID NO: 3080 - DNA, 225 bp, Unknown
  bacterial strain Ascusb_3391 encodes 16S rRNA
agagtttgatcatggctcaggacgaacgctggcggcgtgcttaacacatgcaagtcgagcggggatagaattggaagttcttcgggatggaagattctattccagcggcggacgggtgagtaacgcgtgaacaatctgtcccagacagggggataacacttggaaacaggtgctaataccgcataagaccacgttttcgcatgggaatggggtaaaaggagcaat

SEQ ID NO: 3081 - DNA, 225 bp, Unknown
  bacterial strain Ascusb_3934 encodes 16S rRNA
agagtttgatcatggctcaggacgaacgctggcggcgtgcttaacacatgcaagtcgaacgaggtttactggagagcttgctcgaaggtaaaccgagtggcggacgggtgagtaacgcgtgaacaatctgtctcatacagggggataacgcatcgaaagatgtgctaataccgcgtaggaccacaggaggacatcctccaggggtgaaaggagcaatccggtatg

SEQ ID NO: 3082 - DNA, 225 bp, Unknown
  bacterial strain Ascusb_3590 encodes 16S rRNA
agagtttgatcatggctcaggatgaacgctagctacaggcttaacacatgcaagtcgaggggcagcatgatcttagcttgctaagattgatggcgaccggcgcacgggtgagtaacgcgtatccaaccttccccttagtagaggatagcccggcgaaagtcggattaatactctatgttttccgttgagagcatttgaagtggaacaaaggtttaccgctaaggg

SEQ ID NO: 3083 - DNA, 225 bp, Unknown
  bacterial strain Ascusb_1208 encodes 16S rRNA
agagtttgatcatggctcaggacgaacgctggcggcgtgcttaacacatgcaagtcgaacgggcttaaagaggagcttgcttttctttaagttagtggcggacgggtgagtaacgcgtgagcaacttgccttggacagtggaataacacagggaaacttgtgctaataccgcatgaagtgcggagagggcatcctttctgtaccaaaggaagcaattccggtctg

SEQ ID NO: 3084 - DNA, 225 bp, Unknown
  bacterial strain Ascusb_10958 encodes 16S rRNA
agagtttgatcctggctcaggatgaacgctggcggcgtgcttaacacatgcaagtcgaacgaagctccatttaagatttcttcggaatgattttgtggatgacttagtggcggacgggtgagtaacgcgtgaggaacctgccttgcagtggggaataacagttggaaacgactgctaataccgcataacacggagagatcgcatgttttctccgtcaaagattta

SEQ ID NO: 3085 - DNA, 225 bp, Unknown
  bacterial strain Ascusb_1823 encodes 16S rRNA
agagtttgatcctggctcaggatgaacgctggcggcgtgcttaacacatgcaagtcgaacgaagcatctggtctgatttcttcggattgaagaccttatgacttagtggcggacgggtgagtaacgcgtgggcaatctgccccataccgggggacaacagttggaaacgactgctaataccgcataagcgcacggagccgcatggttctgtgtgaaaaactccgg

SEQ ID NO: 3086 - DNA, 225 bp, Unknown
  bacterial strain Ascusb_1042 encodes 16S rRNA
agagtttgatcctggctcaggatgaacgctggcggcgtgcttaacacatgcaagtcgaacgaagccaaaaggaagcttgctttctttgaagcttagtggcggacgggtgagtaacgcgtgaggaacctgcccttcagtggggaataacagccggaaacgactgctaataccgcataacgtcaccggatcgcatgatctggtgaccaaaggatttattcgctgaag

SEQ ID NO: 3087 - DNA, 225 bp, Unknown
  bacterial strain Ascusb_6252 encodes 16S rRNA
agagtttgatcatggctcaggatgaacgctggcggcgtgcttaacacatgcaagtcgaacggagtattgacgctgacgagcagagtagcttgctacgaagcaaatcttgttgatacttagtggcggacgggtgagtaacgcgtgggtaacctgccatatacagggggataacacttagaaataggtgctaataccgcataagcgcacagtaccgcatggtagagt

SEQ ID NO: 3088 - DNA, 225 bp, Unknown
  bacterial strain Ascusb_5946 encodes 16S rRNA
agagtttgatcatggctcaggatgaacgctagcggcaggcttaacacatgcaagtcgaggggcagcgtggagtagcaatactctgacggcgaccggcgaaagggtgagtaacgcgtgagcaacatgcccggtagtggagaatagtcgatggaaacgtcgcgtaatactccgtaacacagagaaccgcatgattttctgttaatagatttatcgctaccggattgg

SEQ ID NO: 3089 - DNA, 225 bp, Unknown
  bacterial strain Ascusb_5499 encodes 16S rRNA
agagtttgatcatggctcaggatgaacgctagcggcaggcttaacacatgcaagtcgaggggcagcgggtccagcaatggatgccggcgaccggcgcaagggtgcgtaacgcgtgagcgacatgcccgtgacctggggataaccgatggaaacgtcgcctaacccccaatacgatacacattcgcatggaagtgtattgaaaaccccggtggtcacggattggct

SEQ ID NO: 3090 - DNA, 225 bp, Unknown
  bacterial strain Ascusb_1715 encodes 16S rRNA
agagtttgatcatggctcaggatgaacgctagctacaggcttaacacatgcaagtcgaggggcatcattgcgatagcttgctattgcagatggcgaccggcgcacgggtgagtaacgcgtatccaacctggcccttagtaggggatagcccggcgaaagtcggattaataccctatgttctcagcggcagacatctaatgctgagcaaagattcatcgctaaggg

SEQ ID NO: 3091 - DNA, 225 bp, Unknown
  bacterial strain Ascusb_146 encodes 16S rRNA
agagtttgatcatggctcaggatgaacgctggcggcgtgcttaatacatgcaagtcgaacgaagcacttacgacagatcccctcggggtgaagatgtttgtgacttagtggcggacgggtgagtaacgcgtgggtaacctgcctcatgcagggggataacagttagaaatgactgctaataccgcataagcgcacggattcgcatgtttctgtgtgaaaagattt

SEQ ID NO: 3092 - DNA, 225 bp, Unknown
  bacterial strain Ascusb_751 encodes 16S rRNA
agagtttgatcatggctcaggatgaacgctagctacaggcttaacacatgcaagtcgaggggcagcaggatcttagcttgctaagattgctggcgaccggcgcacgggtgagtaacgcgtatccaaccttccccttagtagggcatagcccgatgaaaatcggattaataccctatgttttccaatgaggacatctgagctggaacaaagattcatcgctaaggg

SEQ ID NO: 3093 - DNA, 225 bp, Unknown
  bacterial strain Ascusb_5320 encodes 16S rRNA
agagtttgatcatggctcaggatgaacgctggcggcgtgcctaatacatgcaagtcgaacgggggcacttgtgccctagtggcgaacgggtgagtaacacgtaggtaacctgcccttaagcttgggatacccagaggaaactttggctaataccggataacaacagatgaggcatctcaactgtttgaaaggccctttacggggtcacttaaggatggacctgcg

SEQ ID NO: 3094 - DNA, 225 bp, Unknown
  bacterial strain Ascusb_6606 encodes 16S rRNA
agagtttgatcctggctcaggatgaacgctggcggcgtgcctaacacatgcaagtcgaacggagatatgcggaatgcggacttgtccaaatgaaacatatgcttagtggcggacgggtgagtaacgcgtggataacctgcctttttctgggggatagcagttggaaacgactggtaataccgcatgagcttgtccctgggcatccaggggtgaggaaagatttat

SEQ ID NO: 3095 - DNA, 225 bp, Unknown
  bacterial strain Ascusb_4938 encodes 16S rRNA
agagtttgatcatggctcaggatgaacgctagctacaggcttaacacatgcaagtcgaggggcagcattatcgaagcttgctttgatagatggcgaccggcgcacgggtgcgtaacacgtatccaatctacccatggctcagggatagcctttcgaaagaaagattaatacctgatggtcttacatggagacatctcctagtaagtaaagatttatcggcgatgg

SEQ ID NO: 3096 - DNA, 225 bp, Unknown
  bacterial strain Ascusb_20566 encodes 16S rRNA
agagtttgatcatggctcaggattaacgctggcggcatgcctaagacatgcaagtcgaacgaagtgccccattgagaatggaatgaagttggagagcttgctcaaagatggaatgaagtaggatttggattctgcacttagtggcgaacgggtgagtaacacgtgggttatctgccttcaagctggggataacagttagaaatgactgctaataccgaatgtgct

SEQ ID NO: 3097 - DNA, 225 bp, Unknown
  bacterial strain Ascusb_2651 encodes 16S rRNA
agagtttgatcctggctcagaacgaacgctggcggcgcgtcttaagcatgcaagtcgagcgggagatggtagcttgctaccattgagagcggcggactggtgagtaacgcgtgggtgacgtaccctccggacggggatagctcctagaaataggaggtaataccggatacggtgcctgctgtcagagggcaggcaggaaaggttcttttgaaccgccgggggagc

SEQ ID NO: 3098 - DNA, 225 bp, Unknown
  bacterial strain Ascusb_1481 encodes 16S rRNA
agagtttgatcctggctcaggacgaacgctggcggcgtgcctaacacatgcaagtcgaacgggcgaagggagcttgctcccggagctagtggcgaacgggtgagtaacgcgtgagcaacctgcctttcagagggggacaacggtcggaaacgaccgctaataccgcatgatgcaattggaccgcatgatctgattgccaaagatttatcgctgaaagatgggctc

SEQ ID NO: 3099 - DNA, 225 bp, Unknown
  bacterial strain Ascusb_1461 encodes 16S rRNA
agagtttgatcatggctcaggatgaacgctagctacaggcttaacacatgcaagtcgaggggcagcaggatttgtgcttgcacagattgctggcgaccggcgcacgggtgagtaacgcgtatccaaccttccccatagtagaggatagcccggcgaaagtcggattaatactctatgttgtacaacgaggacatctgaattgtaccaaagattcatcgctatggg

SEQ ID NO: 3100 - DNA, 225 bp, Unknown
  bacterial strain Ascusb_1633 encodes 16S rRNA
agagtttgatcatggctcaggatgaacgctggcggcgtgcctaacacatgcaagtcgaacggaagataagcgcttcggagacttcggtcaatgtttgcttaactttagtggcggacgggtgagtaacgcgtggataacctgcctcatacagggggataacagttagaaatgactgctaataccgcataagcgcacggaatcgcatgtttctgtgtgaaaaactga

SEQ ID NO: 3101 - DNA, 225 bp, Unknown
  bacterial strain Ascusb_4091 encodes 16S rRNA
agagtttgatcatggctcaggatgaacgctggcggcgtgcctaatacatgcaagtcgaacgggtgcagcaatgcattagtggcgaacgggtgagtaacacgttggtgacctgccccaaagatgggaatatcacctggaaacgggtggcaaaaccgaataagcttgaccgagttagagaaagtcaagtaaaagcgaaagctactttgggaggggcctgcggcccat

SEQ ID NO: 3102 - DNA, 225 bp, Unknown
  bacterial strain Ascusb_6431 encodes 16S rRNA
agagtttgatcatggctcaggatgaacgctggcggcgtgcctaacacatgcaagtcgaacggagatttaacgctgatgagacttcggtcaattcttgttaaatcttagtggcggacgggtgagtaacgcgtgggcaacctgcctcgtactgggggataacagttggaaacgactgttaataccgcataagcgcacggtgtcgcatgacacagtgtgaaaaactcc

SEQ ID NO: 3103 - DNA, 225 bp, Unknown
  bacterial strain Ascusb_3827 encodes 16S rRNA
agagtttgatcatggctcaggatgaacgctggcggcgtgcctaacacatgcaagtcgaacggagttatattggacggatcttcggagacagaagatataacttagtggcggacgggtgagtaacgcgtggagaacctggcccatacagggggacagcagctggaaacggctgataataccgcataagaccacgataccgcatggtattgaggtaaaagatttatc

SEQ ID NO: 3104 - DNA, 225 bp, Unknown
  bacterial strain Ascusb_6110 encodes 16S rRNA
agagtttgatcatggctcaggacgaacgctggcggcgtgcttaacacatgcaagtcgagcggagacatatgacggaaagcttcggctggaagatatatgttttagcggcggacgggtgagtaacgcgtgagcaatctgtccttcacagggggataagataccgaaaggtgttctaataccgcatgagaccacaacgtcacatggcgaaggggtcaaaggagcaat

SEQ ID NO: 3105 - DNA, 225 bp, Unknown
  bacterial strain Ascusb_2817 encodes 16S rRNA
agagtttgatcctggctcaggatgaacgctggcggcgtgcttaacacatgcaagtcgaacggagccaaaaggaagcttgctttctttgaagcttagtggcggacgggtgagtaacgcgtgagtaacctgcccttcagtggggaataacacagagaaatctgtgctaataccgcataatgtcttcttgccgcatgacaggaagaccaaaggatttattcgctgaag

SEQ ID NO: 3106 - DNA, 225 bp, Unknown
  bacterial strain Ascusb_1630 encodes 16S rRNA
agagtttgatcatggctcaggatgaacgctagctacaggcttaacacatgcaagtcgtggggcagcatgaaggaagcttgcttcctttgatggcgaccggcgcacgggtgagtaacgcgtatccaaccttccccttactagaggatagcccggcgaaagtcggattaatactctatgttctccttagcaggcatctaacgaggagcaaagattcatcggtaaggg

SEQ ID NO: 3107 - DNA, 225 bp, Unknown
  bacterial strain Ascusb_7003 encodes 16S rRNA
agagtttgatcatggctcaggatgaacgctagctacaggcttaacacatgcaagtcgaggggcagcatgattctagcttgctagaattgatggcgaccggcgcacgggtgagtaacgcgtatccaaccttccctatagtagaggatagcccggcgaaagtcggattaatactctatgttttccaatgaggacatctgagctggaataaaggtttaccgctatagg

SEQ ID NO: 3108 - DNA, 225 bp, Unknown
  bacterial strain Ascusb_17095 encodes 16S rRNA
agagtttgatcctggctcaggataaacgctggcggcgcacataagacatgcaagtcgaacggaagccgttgtaatgatgttgacatggacagagaacttgttcgaagaaagtggatattgacttacaacaatgactttagtggcggactggtgagtaacgcgtgagcaacctgcctatcagaggggaataacagtgagaaatcattgctaataccgcatatgcca

SEQ ID NO: 3109 - DNA, 225 bp, Unknown
  bacterial strain Ascusb_5500 encodes 16S rRNA
agagtttgatcctggctcagaacgaacgctggcggcgcgtcttaagcatgcaagtcgagcggcagcagcaatgcgagagcggcggacgggtgagtaacacgtgggtaatctgccctccagtcggggatagcctgtggaaacacaggataataccggatgcgatggtctgacacaagttggattaggaaaggggccaaggccccgctggaggatgagcccgcgtcc

SEQ ID NO: 3110 - DNA, 225 bp, Unknown
  bacterial strain Ascusb_6432 encodes 16S rRNA
agagtttgatcatggctcaggatgaacgctagcggcaggcttaacacatgcaagtcgaggggcagcgggtgtagcaatacatgccggcgaccggcgaaagggtgagtaacgcgtgagcaacatgcccgtatgtgggggatagtcgatggaaacgtcgcgtaataccccgtaatatatggagctgcatggttccatattgaaagattcattgcatacggattggct

SEQ ID NO: 3111 - DNA, 225 bp, Unknown
  bacterial strain Ascusb_976 encodes 16S rRNA
agagtttgatcatggctcaggatgaacgctggcggcgtgcttaacacatgcaagtcgaacggagtttagatgaagcttgcgattctaaacttagtggcggacgggtgagtaacgcgtgggtaacctgccttataccgggggataacacttagaaataggtgctaataccgcataagcgcacggagctgcatggctcagtgtgaaaaactccggtggtataagatg

SEQ ID NO: 3112 - DNA, 225 bp, Unknown
  bacterial strain Ascusb_3701 encodes 16S rRNA
agagtttgatcatggctcagaacgaacgctggcggcgcgtcttaagcatgcaagtcggacggcaagatgagagcttgctcttatcctagagtggcggactggtgagtaacgcgtgggtgacgtaccctttagacggggatagcttttagaaataagagataataccggataagctctttattgtcagagggtaaagaggaaagcttcttttgaagcgctgaagga

SEQ ID NO: 3113 - DNA, 225 bp, Unknown
  bacterial strain Ascusb_5149 encodes 16S rRNA
agagtttgatcatggctcaggacgaacgctggcggcgtgcttaacacatgcaagtcgaacgagaatctgtggaaagaggattcgtccaattgaagcagaggacagtggcggacgggtgagtaacgcgtgaggaacctgcctttcagagggggacaacagttggaaacgactgctaataccgcataacgcatttgtatcgcatggtacgaatgccaaagatttatc

SEQ ID NO: 3114 - DNA, 225 bp, Unknown
  bacterial strain Ascusb_14147 encodes 16S rRNA
agagtttgatcctggctcaggatgaacgctggcggcgtgcttaacacatgcaagtcgaacggagtgtaaacgctgaagcgatttcggtcaattcttgtttatacttagtggcggacgggtgagtaacgcgtgggtaacctgccgtatgcagggggacaacagttggaaacgactgctaataccgcataagcgcacagtaccgcatggtatggtgtgaaaagattt

SEQ ID NO: 3115 - DNA, 225 bp, Unknown
  bacterial strain Ascusb_16442 encodes 16S rRNA
agagtttgatcatggctcagaacgaacgctggtggcgtgtcttatacatgcaagtcgagcggggcagcaatgcccagcggcgaacgggtgagtaacgcgtaagcaatctgccccatatcaggaaatacccgtgccaacgcgcggttaatgtccaggagcgtggccttccgcatgggaggttgacaagagatttatcggtatgggatgagcttgcgtccgattagc

SEQ ID NO: 3116 - DNA, 225 bp, Unknown
  bacterial strain Ascusb_3921 encodes 16S rRNA
agagtttgatcatggctcaggatgaacgctagctacaggcttaacacatgcaagtcgaggggcagcattatcgaagcttgctttgatagatggcgaccggcgcacgggtgcgtaacacgtatccaatctacccatggctcagggatagcctttcgaaagaaagattaatacctgatggtctgtgattgagacatctcggacacagtaaagatttatcggcgatgg

SEQ ID NO: 3117 - DNA, 225 bp, Unknown
  bacterial strain Ascusb_4280 encodes 16S rRNA
agagtttgatcatggctcaggataaacgctggcggcgtgcctaatacatgcaagtcgatcgctggagttctagcttgctagagcgaaggagaggcgaacgggtgagtaatacataagcaacctgcccacgaagactgggataattcctggaaacggggactaataccggataggcagcgtgatcgcatgatcgtgctgttaaagattcaaagcactggtggatgg

SEQ ID NO: 3118 - DNA, 225 bp, Unknown
  bacterial strain Ascusb_3898 encodes 16S rRNA
agagtttgatcatggctcaggatgaacgctggcggcgtgcttaacacatgcaagtcgaacggagcttaccgaatgaagttttcggatggattttggtaagcttagtggcggacgggtgagtaacgcgtggggaacctgccccataccgggggacaacagttggaaacgactgctaataccgcataagcgcacggtgtggcatcacacagtgtgaaaaactccggt

SEQ ID NO: 3119 - DNA, 225 bp, Unknown
  bacterial strain Ascusb_719 encodes 16S rRNA
agagtttgatcatggctcaggatgaacgctagctacaggcttaacacatgcaagtcgcggggcatcaggagagaagcttgcttttcttgctggcgaccggcgcacgggtgagtaacgcgtatccaaccttccccttagtagggcatagcccggcgaaagtcggattaataccctatgttgtccgacgaaggcatctgacttggaccaaagattcatcgctaaggg

SEQ ID NO: 3120 - DNA, 225 bp, Unknown
  bacterial strain Ascusb_7288 encodes 16S rRNA
agagtttgatcctggctcaggataaacgctggcggcgcacataagacatgcaagtcgaacggaagtcgttgtaatgatgtggatatgaacagagaacttgttcaacgggaattgatattgacttacaacaatggctttagtggcggactggtgagtaacacgtaagcaacctgcctattagaggggaataacagtgagaaatcattgctaataccgcatatgcca

SEQ ID NO: 3121 - DNA, 225 bp, Unknown
  bacterial strain Ascusb_4534 encodes 16S rRNA
agagtttgatcatggctcaggacgaacgctggcggcgtgcctaacacatgcaagtcgaacgaagcactttccttggagattcgtcgaagagggatttgacttagtggcggacgggtgagtaatacatgagcaacctgccctgaggagggggacaacagttggaaacgactgctaataccgcatgatgtatccgggaggcatctactggataccaaagatttatcg

SEQ ID NO: 3122 - DNA, 225 bp, Unknown
  bacterial strain Ascusb_8854 encodes 16S rRNA
agagtttgatcatggctcaggacgaacgctggcggcgtgcttaacacatgcaagtcgaacggggataacgttggaagtccttcgggacggaagatgttattcgagtggcggacgggtgagtaacgcgtgagcaacctgtcccagacagggggataacacttggaaacaggtgctaataccgcataagaccacggcatcacatggtgctgaggtaaaaggagcaat

SEQ ID NO: 3123 - DNA, 225 bp, Unknown
  bacterial strain Ascusb_7633 encodes 16S rRNA
agagtttgatcctggctcaggatgaacgctagctacaggcttaacacatgcaagtcgaggggcagcaggagattagcttgctaatcttgctggcgaccggcgcacgggtgagtaacgcgtatccaaccttccccttagtagggcatagcccggcgaaagtcggattaataccctatgttttccgtcgatgacatcagaagtggaataaagatttatcgctaaggg

SEQ ID NO: 3124 - DNA, 225 bp, Unknown
  bacterial strain Ascusb_1065 encodes 16S rRNA
agagtttgatcatggctcaggatgaacgctggcggcgtgcctaatacatgcaagtcgatcgagggagacttagcttgctaagtcgaactagaggcgaacgggtgagtaatacataagcaacctgcccacgaagactgggataatccctggaaacggggactaataccggataggtaaccggaccgcatgatctggttattaaaggttaaaaacactggtggatgg

SEQ ID NO: 3125 - DNA, 225 bp, Unknown
  bacterial strain Ascusb_2707 encodes 16S rRNA
agagtttgatcctggctcaggatgaacgctggcggcgtgcctaacacatgcaagtcgaacggagtgttttcttcggaggacacttagtggcggacgggtgagtaacgcgtgggtaatctgccttacacagggggacaacagttggaaacgactgctaataccgcataagcccacgggaccgcatggtcctgtgagaaaagattcatcggtgtaagatgagcccgc

SEQ ID NO: 3126 - DNA, 225 bp, Unknown
  bacterial strain Ascusb_2116 encodes 16S rRNA
agagtttgatcatggctcaggatgaacgctggcggcgtgcttaacacatgcaagtcgaacgaagcatttggtttgatttcttcggaatgaagaccttgtgacttagtggcggacgggtgagtaacgcgtgggcaatctgccccataccgggggacaacagttggaaacgactgctaataccgcataagcgcacgaggccgcatggccgtgtgtgaaaaactccgg

SEQ ID NO: 3127 - DNA, 225 bp, Unknown
  bacterial strain Ascusb_2403 encodes 16S rRNA
agagtttgatcatggctcaggatgaacgctggcggcgtgcttaacacatgcaagtcgaacgaagcattaagaattgatttcttcggattgattttctttttgacttagtggcggacgggtgagtaacgcgtgggtaacctgccgtatgcagggggacaacagttagaaatgactgctaataccgcataacccgctagtgccgcatggcacagacggaaaagattt

SEQ ID NO: 3128 - DNA, 225 bp, Unknown
  bacterial strain Ascusb_2502 encodes 16S rRNA
agagtttgatcatggctcagaacgaacgctggcggcaggcctaaaacatgcaagttgaacggttacagcaatgtagcagtagcggacgggtgaggaacatatgggaacatgccttttggtgtggaataacatctggaaacgggtgataataccgcataagccctttgggggaaagatttatcgccggaagagtggcccatatcagattagctagttggttaggta

SEQ ID NO: 3129 - DNA, 225 bp, Unknown
  bacterial strain Ascusb_1934 encodes 16S rRNA
agagtttgatcatggctcaggacgaacgctggcggcgtgcttaacacatgcaagtcgaacgaggattattgagcggaaggcttcggccggaaggttgataattcgagtggcggacgggtgagtaacgcgtgaacaatctgtcccagacagggggataacacttggaaacaggtgctaataccgcataagaccacagaatcgcatggtacaggggtaaaaggagca

SEQ ID NO: 3130 - DNA, 225 bp, Unknown
  bacterial strain Ascusb_589 encodes 16S rRNA
agagtttgatcatggctcaggatgaacgctggcggcgtgcctaacacatgcaagtcgaacggtggtgattgatattttcggatggatatcaccatagtggcggacgggtgagtaacgcgtggataacctgcctcgtactggggaatagcagctggaaacggctggtaataccgcataagcgcacagtgccgcatgacacggtgtgaaaagatttatcggtacgag

SEQ ID NO: 3131 - DNA, 225 bp, Unknown
  bacterial strain Ascusb_253 encodes 16S rRNA
agagtttgatcatggctcaggatgaacgctagcggcaggcttaacacatgcaagtcgaggggcagcaggcggtagcaatactgtgctggcgaccggcgcacgggtgcgtaacgcgtatgcaacctacccactacagggggataacggagggaaacttccactaatatcccatggtgttgttttcccgcatggggaggcaactaaagcttcggtggtagtggatgg

SEQ ID NO: 3132 - DNA, 225 bp, Unknown
  bacterial strain Ascusb_2188 encodes 16S rRNA
agagtttgatcctggctcaggatgaacgctagcgacaggcctaacacatgcaagtcgaggggcagcgcgggagaagcttgcttttcctggcggcgaccggcgcacgggtgcgtaacaggtgtgcaatctgtccatagtcgggggatagcccagcgaaagctgaattaacactccatgtgaatcgaagccgcatgactttgatttgaaacgcaaggactatgggtg

SEQ ID NO: 3133 - DNA, 225 bp, Unknown
  bacterial strain Ascusb_1817 encodes 16S rRNA
agagtttgatcatggctcaggatgaacgctggcggcgtgcctaatacatgcaagtcgagcgagaacttcagaagttgcgatttatcaagacggaagaagggaaagcggcggacgggtgagtaacgcgtaggcaacctgcccctggcagagggatagccattggaaacgatgattaaaacctcataacgctggaagcacacatgtgcaatcagccaaagatttatc

SEQ ID NO: 3134 - DNA, 225 bp, Unknown
  bacterial strain Ascusb_4452 encodes 16S rRNA
agagtttgatcatggctcaggatgaacgctagctacaggcttaacacatgcaagtcgaggggcagcatgggtgttgcttgcaacacctgatggcgaccggcgcacgggtgagtaacgcgtatccaaccttccccatagtagggcatagcccggcgaaagtcggattaattccctatgttcttcacagcggacatctcatgtgaagcaaaggtccaccgctatggg

SEQ ID NO: 3135 - DNA, 225 bp, Unknown
  bacterial strain Ascusb_1137 encodes 16S rRNA
agagtttgatcatggctcaggataaacgctggcggcgtgcctaatacatgcaagtcgatcgctggaattcaagcttgcttgaatgaaggagaggcgaacgggtgagtaatacataagcaacctgcccacgaagactgggataatccctggaaacggggactaataccggataggtaacatattcgcatgaagatgttattaaagattagaagcactggtggatgg

SEQ ID NO: 3136 - DNA, 225 bp, Unknown
  bacterial strain Ascusb_1464 encodes 16S rRNA
agagtttgatcctggctcaggacaaacgctggcggcgtgcctaacacatgcaagtcgaacgaagcactgtggaaagagacttcggtcaattgaaactttgacttagtggcggacgggtgagtaatgcatgagcaacctgccctggagagggggacaacagctggaaacggctgctaataccgcatgatgttgcggggaggcatcttcctgcaaccaaagatttat

SEQ ID NO: 3137 - DNA, 225 bp, Unknown
  bacterial strain Ascusb_17456 encodes 16S rRNA
agagtttgatcctggctcaggatgaacgctagctacaggcttaacacatgcaagtcgaggggaaacgattagaggtgcttgcaccactaaggcgtcgaccggcgcacgggtgagtaacgcgtatccaacctgccccacggtaaggaataatccgtagaaatgcggtctaataccttatgtgctccgaagaggacatctgatttggagtaaagatttatcgccatg

SEQ ID NO: 3138 - DNA, 225 bp, Unknown
  bacterial strain Ascusb_6358 encodes 16S rRNA
agagtttgatcatggctcaggacgaacgctggcggcgtgcttaacacatgcaagtcgaacggggataaattggatgagagcttcggcaggaatttgatttatcctagtggcggacgggtgagtaacgcgtgagcaacctgtcccagacagggggataacacttggaaacaggtgctaataccgcataagaccacgggatcacatggttctgaggtaaaaggtgta

SEQ ID NO: 3139 - DNA, 225 bp, Unknown
  bacterial strain Ascusb_5583 encodes 16S rRNA
agagtttgatcatggctcaggataaacgctggcggcgtgcttaacacatgcaagtcgaacggagtattcctcccgaggattgacgaagcttgcttctgattgactcaattggaatacttagtggcggacgggtgagtaacgcgtgggtaacctgcctcacacagggggataacagttggaaacgactgttaataccgcataagcgcacagtaccgcatggtacgg

SEQ ID NO: 3140 - DNA, 225 bp, Unknown
  bacterial strain Ascusb_7077 encodes 16S rRNA
agagtttgatcatggctcaggatgaacgctagcggcaggcttaacacatgcaagtcgaggggcagcgcgggtagcaatacttggcggcgaccggcgaaagggtgagtaacgcgtgagcaacatacccgttggtgggggataggaggtggaaacgccttgtaataccccatacgatacgaagtggcatcacattgtattgaaagattcattgccaacggattggtt

SEQ ID NO: 3141 - DNA, 225 bp, Unknown
  bacterial strain Ascusb_19117 encodes 16S rRNA
agagtttgatcatggctcagaacgaacgctggcggcgcgtcttaagcatgcaagtcgggcggcaaggatgtgcttgcacatccctagagcggcggactggtgagtaacgcgtgggtgacgcaccctccggacggggatagcctgcagaaatgcagggtaataccggatacggccatacgggctggagccgtatggggaaaggagcttcggctccgccgggggagc

SEQ ID NO: 3142 - DNA, 225 bp, Unknown
  bacterial strain Ascusb_1737 encodes 16S rRNA
agagtttgatcctggctcaggacgaacgctggcggcgtgcttaacacatgcaagtcgaacggggattagttgatagagagcttcggcaggaaattgattaattcgagtggcggacgggtgagtaacgcgtgagcaacctgtcccagacagggggataacacttggaaacaggtgctaataccgcataagaccacgggatcacatggttccggggtaaaaggagca

SEQ ID NO: 3143 - DNA, 225 bp, Unknown
  bacterial strain Ascusb_1276 encodes 16S rRNA
agagtttgatcatggctcaggatgaacgctagctacaggcttaacacatgcaagtcgaggggtaacatgattggagcttgctccgattgatgacgaccggcgcacgggtgagtaacgcgtatccaacctgccccatgctctgggataaccttccgaaagggagcctaataccggatgttgtgcgacgatggcatcagaattgcacgaaagattcatcggcatggg

SEQ ID NO: 3144 - DNA, 225 bp, Unknown
  bacterial strain Ascusb_944 encodes 16S rRNA
agagtttgatcatggctcaggatgaacgctagcgggaggcttaacacatgcaagtcgaggggcagcgcgggtagcaatacctggcggcgaccggcggacgggtgagtaacacgtatgcaacctgccctgcacaggggaatagcccggagaaatccggattaatgccccatggtccactgggtccgcatggatgtggtggtaaagattcatcggtgcaggatgggc

SEQ ID NO: 3145 - DNA, 225 bp, Unknown
  bacterial strain Ascusb_1822 encodes 16S rRNA
agagtttgatcatggctcaggattaacgctggcggcgtgcataacacattcaagtcgaacggatgatgaagcttcggtttcatcattagtggcggacgggtgagtaacgcgtgagcaatctgcccctgattgcgggataacagagagaaatttctgctaatacggcataacacatcgggaccgcatggttctggtgtcaaagattcattgatcagggatgagctc

SEQ ID NO: 3146 - DNA, 225 bp, Unknown
  bacterial strain Ascusb_12657 encodes 16S rRNA
agagtttgatcatggctcaggacgaacgctggcggcgtgcttaacacatgcaagtcgaacgaggttatgtgaaggaagtcttcggatggaatttatgtaatcgagtggcggacgggtgagtaacgcgtgaggaacctgtcttctacagggggataacggtccgaaaggattgctaataccgcataagaccacggggccgcatggttttgaggtcaaaggagaaat

SEQ ID NO: 3147 - DNA, 225 bp, Unknown
  bacterial strain Ascusb_4724 encodes 16S rRNA
agagtttgatcatggctcaggatgaacgctggcggcgtgcataacacattcaagtcgaacgaagcgtagggaacggagccttcgggcgaagagaactatgacttagtggcggacgggtgagtaacgcgtgagcaaccttcctgcctgtgagggataacacagggaaacttgtgctaataccgcatgacgtatggagaccgcatgatcatcataccaaagatatat

SEQ ID NO: 3148 - DNA, 225 bp, Unknown
  bacterial strain Ascusb_535 encodes 16S rRNA
agagtttgatcatggctcaggatgaacgctggcggcgtgcctaatacatgcaagtcgaacgaagttacttcggtaacttagtggcgaacgggtgagtaacacatgaacaacctaccctgacgacagggataacagtttgaaaagactgctaatacctgataggtgtaacggggacatccctgatacattaaagttgggatacaacgcgacaggatgggttcatgt

SEQ ID NO: 3149 - DNA, 225 bp, Unknown
  bacterial strain Ascusb_1978 encodes 16S rRNA
agagtttgatcatggctcaggatgaacgctggcggcgtgcttaacacatgcaagtcgaacgaagctcttttgttgatcccttcggggtgattcaaaagatgactgagtggcggacgggtgagtaacgcgtgggtaacctgccctatacagggggataacagttggaaacggctgctaataccgcataagcgcacaggaccgcatggtctggtgtgaaaaactccg

SEQ ID NO: 3150 - DNA, 225 bp, Unknown
  bacterial strain Ascusb_9134 encodes 16S rRNA
agagtttgatcatggctcaggataaacgctggcggcgcacataagacatgcaagtcgaacggaagtcgtatataaacagaatgacgatttatctgaatgaagtttatatacaatggctttagtggcggactggtgagtaatacgtaagcaacctgcctattagaggggaacaacagttagaaatgactgctaataccgcatatgccataatggagacatctccat

SEQ ID NO: 3151 - DNA, 225 bp, Unknown
  bacterial strain Ascusb_1146 encodes 16S rRNA
agagtttgatcatggctcaggatgaacgctggcggcgtgcctaacacatgcaagtcgaacggggttaagtgatatcttcggatggaccttaacttagtggcggacgggtgagtaacgcgtggataacctgcctcacactgggggatagcagctggaaacggctggtaataccgcataagaccacgatgccgcatggcaccggggtaaaagatttatcggtgtgag

SEQ ID NO: 3152 - DNA, 225 bp, Unknown
  bacterial strain Ascusb_83 encodes 16S rRNA
agagtttgatcatggctcaggatgaacgctagctacaggcttaacacatgcaagtcgaggggcagcatgaagtttgcttgcaaactttgatggcgaccggcgcacgggtgagtaacgcgtatccaaccttccccttactagggaatagcccggcgaaagtcggattaatgccctatgttctcctttgcgggcatctaacgaggagcaaagattcatcggtaaggg

SEQ ID NO: 3153 - DNA, 225 bp, Unknown
  bacterial strain Ascusb_1697 encodes 16S rRNA
agagtttgatcatggctcaggatgaacgctggcggcgtgcttaacacatgcaagtcgaacggagactgttgatgaagcggaagggcttgcccggaagtggaattgatagtcttagtggcggacgggtgagtaacgcgtgggtaacctacctcatacaggggaatagcagttggaaacgactgataaaaccgcataaaacggcagcagggcatcctgcaaccgtca

SEQ ID NO: 3154 - DNA, 225 bp, Unknown
  bacterial strain Ascusb_1213 encodes 16S rRNA
agagtttgatcatggctcaggatgaacgctggcggcatgcctaacacatgcaagtcgaacggagttatgagatagcttgctattgagtaacttagtggcggacgggtgagtaacgcgtgagtaacctgcctctcagagggggataacgttctgaaaaggacgctaataccgcatataattacgaagtcgcatgattttgtaatgaaaggagcaatccgctgagag

SEQ ID NO: 3155 - DNA, 225 bp, Unknown
  bacterial strain Ascusb_919 encodes 16S rRNA
agagtttgatcatggctcaggacgaacgctggcggcgtgcctaacacatgcaagtcgaacggaacgaaaagagcttgctcttggcgtttagtggcggacgggtgagtaacacgtgagtaacctgcctttcagaggggaataatgtctggaaacggacactaataccgcataatgtattttaaccgcatggttgagataccaaaggagcaatccgctgaaagatgg

SEQ ID NO: 3156 - DNA, 225 bp, Unknown
  bacterial strain Ascusb_1184 encodes 16S rRNA
agagtttgatcatggctcaggatgaacgctagctacaggcttaacacatgcaagtcgaggggcagcgcggagtcagcttgctgactttggcggcgaccggcgaatgggtgagtaacgcgtatccaacctggcctatgctcatggatagcccttagaaatgaggattaatacatgatggtctcccttgatcgcctgagattgggagtaaaggcttgccggcatagg

SEQ ID NO: 3157 - DNA, 225 bp, Unknown
  bacterial strain Ascusb_1429 encodes 16S rRNA
agagtttgatcctggctcaggatgaacgctagctacaggcttaacacatgcaagtcgaggggcatcagggagaaagcttgctttctttgctggcgaccggcgcacgggtgagtaacgcgtatccaaccttccccccagtagggcatagcccggcgaaagtcggattaataccctatgttgtgtcatgaggacatctgaataacaccaaagatttatcgctggggg

SEQ ID NO: 3158 - DNA, 225 bp, Unknown
  bacterial strain Ascusb_2648 encodes 16S rRNA
agagtttgatcatggctcaggatgaacgctagctacaggcttaacacatgcaagtcgaggggtaacatgattggagcttgctccgattgatgacgaccggcgcacgggtgagtaacgcgtatccaacctgccccatgctcagggataaccttccgaaagggagcctaatacctgatgttgtgcgacgatggcatcagaattgcactaaagattcatcggcatggg

SEQ ID NO: 3159 - DNA, 225 bp, Unknown
  bacterial strain Ascusb_4927 encodes 16S rRNA
agagtttgatcatggctcaggatgaacgctagctacaggcttaacacatgcaagtcgaggggcatcaggatcttagcttgctaagattgctggcgaccggcgcacgggtgagtaacgcgtatccaaccttccctgtagtaggggatagcccggagaaatccggattaataccctatgttattcaatgaggacatctgagctgaatcaaaggcttgccgctacagg

SEQ ID NO: 3160 - DNA, 225 bp, Unknown
  bacterial strain Ascusb_10064 encodes 16S rRNA
agagtttgatcatggctcaggatgaacgctggcggcgtgcataacacattcaagtcgaacggtgaagtgccttcgggcatggatcagtggcggacgggtgagtaacgcgtgagcaacctgccatacagtgggggataacacagggaaacttgtgctaataccgcatgacacattgggatcgcatgtttctgatgtcaaagagcaattgctgtatgatgggctcgc

SEQ ID NO: 3161 - DNA, 225 bp, Unknown
  bacterial strain Ascusb_338 encodes 16S rRNA
agagtttgatcctggctcaggatgaacgctggcggcgtgcttaacacatgcaagtcgaacgaggttatggcagcggaagttttcggatggaagcagccttaaccgagtggcggacgggtgagtaacgcgtggggaacctgccccattccgggggataccagttggaaacgactgttaataccgcataagcgcacggtatcgcatgatacagtgtgaaaaactccg

SEQ ID NO: 3162 - DNA, 225 bp, Unknown
  bacterial strain Ascusb_509 encodes 16S rRNA
agagtttgatcatggctcaggatgaacgctggcggcgtgcttaacacatgcaagtcgaacgaagcaccggaccttcgggaccggtgactgagtggcggacgggtgagtaacgcgtgggtaacctgccctgtacagggggataacagttagaaatgactgctaataccgcataagcacacgagggggcatccctttgtgtgaaaaactccggtggtacaggatggg

SEQ ID NO: 3163 - DNA, 225 bp, Unknown
  bacterial strain Ascusb_1421 encodes 16S rRNA
agagtttgatcatggctcaggatgaacgctggcggcgtgcctaacacatgcaagtcgagcgagatactgttgaacagagattcgtcaacgggatacagtggaaagcggcggacgggtgagtaacgcgtaggcaacctgccccttacacagggatagccattggaaacgatgattaaaacctgatgacacctgaggatgacatcttcctgaggtcaaagatttatc

SEQ ID NO: 3164 - DNA, 225 bp, Unknown
  bacterial strain Ascusb_10114 encodes 16S rRNA
agagtttgatcctggctcaggatgaacgctggcggcgtgcttaacacatgcaagtcgaacggagtttaccgaatgaagttttcggatggattttgataaacttagtggcggacgggtgagtaacgcgtggggaacctgccccataccgggggacaacagttggaaacgactgctaataccgcataagcgcacggagcggcatcgctttgtgtgaaaaactccggt

SEQ ID NO: 3165 - DNA, 225 bp, Unknown
  bacterial strain Ascusb_4435 encodes 16S rRNA
agagtttgatcatggctcagaacgaacgctggcggcaggcttaacacatgcaagttgagcgggaatggaaggtagcttgctatttttcatgagagcagcgcactggtgagtaacacgtgggaacatgccttttggtgggggacaacagttggaaacgactgctaataccgcataagccctaagggggaaagatttatcgccaaaagattggcccgcggaagatta

SEQ ID NO: 3166 - DNA, 225 bp, Unknown
  bacterial strain Ascusb_1422 encodes 16S rRNA
agagtttgatcatggctcaggacgaacgctggcggcgtgcctaacacatgcaagtcgaacggagctaaagagcttgctttttagcttagtggcggacgggtgagtaatgcgtgagcaacctgcctgtcagtgggggataacttccggaaacggacgctaataccgcatatagtacataatccgcatggataagtgtatgaaaggagcaatccgctgatagatggg

SEQ ID NO: 3167 - DNA, 225 bp, Unknown
  bacterial strain Ascusb_1550 encodes 16S rRNA
agagtttgatcctggctcaggatgaacgctggcggcgcgcctaacacatgcaagtcgaacggttaaagcaccttcgggtgtgtataaagtggcgaacggctgagtaacacgtgggcaacctgcccctcgcaccgggacagcctcgggaaaccgtggttaataccggatacgcccaggagaggacatcccctcctggggaaagccccgacggcgagggatgggccc

SEQ ID NO: 3168 - DNA, 225 bp, Unknown
  bacterial strain Ascusb_2641 encodes 16S rRNA
agagtttgatcctggctcaggatgaacgctagcggcaggcttaacacatgcaagtcgaggggtaacagggagtagcaatactctgctgacgaccggcgcacgggtgcgtaacgcgtatgcaacctacctgtaacagggggataacggagggaaacttccactaataccccatattgttattctttcgcatgttaggataacgaaagcttcggtggttacggatgg

SEQ ID NO: 3169 - DNA, 225 bp, Unknown
  bacterial strain Ascusb_6650 encodes 16S rRNA
agagtttgatcatggctcaggataaacgctggcggcgcacataagacatgcaagtcgaacggaagtcgttgtaatgatgtggacgcggacagagaacttgttcgaagaaagtgaaaattgacttacaacaatggctttagtggcggactggtgagtaacgcgtgagcaacctgcctgttagaggggaataacagtgagaaatcattgctaataccgcatatgcca

SEQ ID NO: 3170 - DNA, 225 bp, Unknown
  bacterial strain Ascusb_5433 encodes 16S rRNA
agagtttgatcatggctcaggatgaacgctagctacaggcttaacacatgcaagtcgaggggcagcatggagtttgcttgcaaactctgatggcgaccggcgcacgggtgagtaacgcgtatccaacctgcccacggccagggaatagcccgctgaaaagcggattaatgccctatggcgtcctttgcagacatctaacgaggactaaaggtttaccggccatgg

SEQ ID NO: 3171 - DNA, 225 bp, Unknown
  bacterial strain Ascusb_7475 encodes 16S rRNA
agagtttgatcatggctcagaacgaacgctggcggcgcgtcttaagcatgcaagtcgagcggtaagttatagcttgctataacctagagcggcggactggtgagtaacgcgtgggtgacgtacccttgtgacggggacagctcctagaaataggagataataccggatacgctgtatgttgtcagaggacatacaggaaaggttcttttgaatcgcacaaggagc

SEQ ID NO: 3172 - DNA, 225 bp, Unknown
  bacterial strain Ascusb_769 encodes 16S rRNA
agagtttgatcatggctcaggacgaacgctggcggcgtgcctaacacatgcaagtcgaacggagtaagatccttcggggttttacttagtggcgaacgggtgagtaacgcgtgagcaacctgcctctttgagggggataacaaccggaaacggttgctaataccgcataagaccacactgtcgcatgacagagaggtcaaaggagcaatccgcagagagaggggc

SEQ ID NO: 3173 - DNA, 225 bp, Unknown
  bacterial strain Ascusb_4552 encodes 16S rRNA
agagtttgatcctggctcaggatgaacgctagctacaggcttaacacatgcaagtcgaggggcagcatgtcggttgcttgcaaccgacgatggcgaccggcgcacgggtgagtaacgcgtatccaaccttccccttagtagggcatagcccggcgaaagtcggattaataccctatgttgttcgtcgaggacatctgaagtgaaccaaagatttatcgctaaggg

SEQ ID NO: 3174 - DNA, 225 bp, Unknown
  bacterial strain Ascusb_3428 encodes 16S rRNA
agagtttgatcatggctcagaacgaacgctggcggcgcgtcttaagcatgcaagtcgagcgggattacctagcttgctaggtatgagagcggcggactggtgagtaacgcgtgggtgacgtacctttgtgatggggacagctcctagaaataggagataataccgaatacgctgcatattgtcagaggatatgcaggaaaggttcttttgaatcgcacagagagc

SEQ ID NO: 3175 - DNA, 225 bp, Unknown
  bacterial strain Ascusb_3220 encodes 16S rRNA
agagtttgatcctggctcaggatgaacgctagcggcaggcttaacacatgcaagtcgaggggtaacagggagtagcaatactctgctgacgaccggcgcacgggtgcgtaacgcgtatgcaacctaccctgtacagggggataacggagagaaatttccactaatatcccatggtgtcgaggaaccgcatggtttttcgactaaagcttcggtggtacaggacgg

SEQ ID NO: 3176 - DNA, 225 bp, Unknown
  bacterial strain Ascusb_6702 encodes 16S rRNA
agagtttgatcatggctcaggatgaacgctggcggcgtgcttaacacatgcaagtcgaacgaagctccatttaagatttcttcggaatgattttatggatgacttagtggcggacgggtgagtaacgcgtgaggaacctgccttgcagtggggaataacagttggaaacgactgctaataccgcataacacggagagatcgcatgttttctccgtcaaagattta

SEQ ID NO: 3177 - DNA, 225 bp, Unknown
  bacterial strain Ascusb_1552 encodes 16S rRNA
agagtttgatcatggctcaggatgaacgctagctacaggcttaacacatgcaagtcgaggggcagcgagaggaaagcttgctttccttgtcggcgaccggcgcacgggtgagtaacgcgtatccaacctggcccttagtaggggatagcccggcgaaagtcggattaataccctatgttatcctttgaggacatctgatttggattaaaggtttaccgctaaggg

SEQ ID NO: 3178 - DNA, 225 bp, Unknown
  bacterial strain Ascusb_3554 encodes 16S rRNA
agagtttgatcatggctcaggattaacgctggcggcatgcctaatacatgcaagtcgaatgggtagcttgctatccatggcgaacgggtgagtaacacgtaggtaacctgtctttaagacgaggataacctttggaaacgaaggataatactggataggtcgttatagatcacatgattaaacgattaaagattattatgtcacttagagaggggcctgcggcgc

SEQ ID NO: 3179 - DNA, 225 bp, Unknown
  bacterial strain Ascusb_3840 encodes 16S rRNA
agagtttgatcatggctcaggacgaacgctggcggcgtgcttaacacatgcaagtcgaacggggataacgttggaagtccttcgggacggaagatgttattcgagtggcggacgggtgagtaacgcgtgagcaatctgtcccagacagggggataacacttggaaacaggtgctaataccgcataagaccacggcatcgcatggtgcgggggtaaaaggtgcgaa

SEQ ID NO: 3180 - DNA, 225 bp, Unknown
  bacterial strain Ascusb_56 encodes 16S rRNA
agagtttgatcatggctcaggatgaacgctagctacaggcttaacacatgcaagtcgaggggtaacgtgaggaaagcttgctttccttgacgacgaccggcgcacgggtgagtaacgcgtatccaacctgccccagagtcagggataaccttccgaaagggagcctaatacctgatgtagtgcgatgatggcatcagagtttcactaaagatttatcgctctggg

SEQ ID NO: 3181 - DNA, 225 bp, Unknown
  bacterial strain Ascusb_1028 encodes 16S rRNA
agagtttgatcatggctcaggacgaacgctggcggcacgcttaacacatgcaagtcgaacggagttgaggaggtgcttgcaccatctcaacttagtggcggacgggtgagtaacacgtgagcaacctgcctttgagagtggaatagcttctggaaacggatggtaataccgcatgaaattatctgaccgcatgatcggataatcaaagatttatcgctcaaagat

SEQ ID NO: 3182 - DNA, 225 bp, Unknown
  bacterial strain Ascusb_10113 encodes 16S rRNA
agagtttgatcctggctcaggatgaatgctggcggcgtgcctaatacatgcaagtcgagcggtaacagggcttcaccgtttccttgacacacctagcgcattatcgtaggtggagagattcgagggaacagtgaagctgctgacgagcggcggacggctgagtaacgcgtgggaacggaccccaaactgagggataactagtcgaaagattagctaataccgcat

SEQ ID NO: 3183 - DNA, 225 bp, Unknown
  bacterial strain Ascusb_2509 encodes 16S rRNA
agagtttgatcctggctcaggatgaacgctggcggcgtgcttaacacatgcaagtcgaacgaggaataattgatgagatcttcggatggatttgattattccgagtggcggacgggtgagtaacgcgtgggtaacctgccccatacagggggacaacagagggaaacttctgctaataccgcataagcggatcggatggcatcgtccggtccggaaagctccggc

SEQ ID NO: 3184 - DNA, 225 bp, Unknown
  bacterial strain Ascusb_2670 encodes 16S rRNA
agagtttgatcctggctcagaacgaacgctggcggcgcgtcttaagcatgcaagtcgagcggtaagattggtgcttgcactaatcctagagcggcggactggtgagtaacgcgtgggtgacgtacctttgtgacggggacagctcctagaaataggagataataccggatacgctgcagcatgtcagaggtgctgcaggaaaggatcttttgattcgcacagaga

SEQ ID NO: 3185 - DNA, 225 bp, Unknown
  bacterial strain Ascusb_5570 encodes 16S rRNA
agagtttgatcatggctcaggatgaacgctagcggcaggcttaacacatgcaagtcgaggggcatcgcgggtagcaatacctggcggcgaccggcggaagggtgagtaacgcgtgagcaacatgccctgtggagggggatagtcactggaaacggtgcgtaataccccgtaacaacaggagaggcatctctccagtttaaaagattcattgtcacaggattggct

SEQ ID NO: 3186 - DNA, 225 bp, Unknown
  bacterial strain Ascusb_9039 encodes 16S rRNA
agagtttgatcatggctcaggatgaacgctagctacaggcttaacacatgcaagtcgaggggcagcatgatcgaagcttgctttgattgatggcgaccggcgcacgggtgagtaacgcgtatccaaccttccctatagtagaggatagcccggcgaaagtcggattaatactctatgttttccaatgaggacatctgagctggaacaaaggttcaccgctatagg

SEQ ID NO: 3187 - DNA, 225 bp, Unknown
  bacterial strain Ascusb_3892 encodes 16S rRNA
agagtttgatcatggctcaggatgaacgctggcggcgtgcttaacacatgcaagtcgaacggaactgcttttgaagatttccttcgggaatgattcagttgtagtttagtggcggacgggtgagtaacgcgtgagtaacctgcccttgagagggggataacgttctgaaaaggacgctaataccgcataacgctattgaatcgcatggtttaatagccaaaactc

SEQ ID NO: 3188 - DNA, 225 bp, Unknown
  bacterial strain Ascusb_1686 encodes 16S rRNA
agagtttgatcatggctcaggatgaacgctagcggcaggcttaacacatgcaagtcgaggggcagcgtggtgtagcaatacaccgacggcgaccggcggaagggtgagtaacgcgtgagcaacatgccaccttcagggggatagtcattggaaacgatgcgtaataccccgtatgcatagaccccacatgggatttatgtgaaagatttatcgggaggtgattgg

SEQ ID NO: 3189 - DNA, 225 bp, Unknown
  bacterial strain Ascusb_1874 encodes 16S rRNA
agagtttgatcatggctcaggacgaacgctggcggcatgcctaacacatgcaagtcgaacggagttaagagagcttgctcttttaacttagtggcggacgggtgagtaacgcgtgagcaatctgcctttcagtggggaataatgttctgaaaagagcactaataccgcataacgtataatcgccgcatgacggatataccaaagatttatcgctgagagatgagc

SEQ ID NO: 3190 - DNA, 225 bp, Unknown
  bacterial strain Ascusb_3198 encodes 16S rRNA
agagtttgatcctggctcaggacgaacgctggcggcgtgcttaacacatgcaagtcgaacggggattacggaacggaaggcttcggccggaagaactgtaattccagtggcggacgggtgagtaacgcgtgaacaatctgtcccagacagggggataacacttggaaacaggtgctaataccgcataagaccacagggccgcatggtccaggggtaaaacgggca

SEQ ID NO: 3191 - DNA, 225 bp, Unknown
  bacterial strain Ascusb_3630 encodes 16S rRNA
agagtttgatcctggctcaggatgaacgctagctacaggcttaacacatgcaagtcgaggggcagcaggattctagcttgctagaattgctggcgaccggcgcacgggtgagtaacgcgtatccaacctggcccttagtagaggatagcccggcgaaagtcggattaatactctatgttctccaatgcgggcatctaatttggagcaaagatttatcgctatggg

SEQ ID NO: 3192 - DNA, 225 bp, Unknown
  bacterial strain Ascusb_4772 encodes 16S rRNA
agagtttgatcatggctcaggatgaacgctggcggcgtgcctaatacatgcaagtcgaacgagggtgcttgcaccctagtggcgaacgggtgagtaacacgtaggtaacctgcccttaagcttgggatacccagaggaaactttggctaataccggataacaacagagaaggcatcttctttgcttaaaaggccctttcgggtcacttaaggatggacctgcggc

SEQ ID NO: 3193 - DNA, 225 bp, Unknown
  bacterial strain Ascusb_7910 encodes 16S rRNA
agagtttgatcctggctcaggatgaacgctagcgacaggcctaacacatgcaagtcgaggggcagcgggattgaagcttgctttaattgccggcgaccggcgcacgggtgcgtaacaggtgtgcaatctgtccatagtcggggaatagcccagcgaaagttggattaatgctccatgtgaatcgagaccgcatgattttgatttgaaacgtaaggactatgggtg

SEQ ID NO: 3194 - DNA, 225 bp, Unknown
  bacterial strain Ascusb_344 encodes 16S rRNA
agagtttgatcatggctcaggatgaacgctagctacaggcttaacacatgcaagtcgagcgggactctttcgggagtctagcggcagacgggtgagtaacacgtatccaacctttcccttactcgggcatagcctctggaaacggagagtaattcccgatgtggtgcacgaatagcattttttgcgcacgaaagattcatcggtaaggggtggggatgcgttcca

SEQ ID NO: 3195 - DNA, 225 bp, Unknown
  bacterial strain Ascusb_404 encodes 16S rRNA
agagtttgatcctggctcaggatgaacgctggcggcgcgcctaacacatgcaagtcgaacggttaaagcacctccgggtgtgtataaagtggcgaacggctgagtaacacgtgggcaacctgcccctcgctccgggacagcctcgggaaactgggagtaataccggatactccgccacccccgcatgggggaggcgggaaagcccttacggcgagggatgggccc

SEQ ID NO: 3196 - DNA, 225 bp, Unknown
  bacterial strain Ascusb_3670 encodes 16S rRNA
agagtttgatcctggctcaggatgaacgctggcggcgtgcctaacacatgcaagtcgaacggaccttatctgaacagaggcttcggccaacgagattataaggttagtggcggacgggtgagtaacgcgtggagaacctgcccttcagagggggataacactcagaaatgggtgctaataccgcataagcgcacggtaccgcatggtaccgtgtgaaaaactcag

SEQ ID NO: 3197 - DNA, 225 bp, Unknown
  bacterial strain Ascusb_643 encodes 16S rRNA
agagtttgatcctggctcaggacgaacgctggcggcgtgcctaacacatgcaagtcgagcggagacacgggaacggaaagcttcggccggaagatcccatgttttagcggcggacgggtgagtaacgcgtgagcaatctgtccttcacagggggataagataccgaaaggtgttctaataccgcataagaccacattcccgcatgggagaggggtcaaaggagca

SEQ ID NO: 3198 - DNA, 225 bp, Unknown
  bacterial strain Ascusb_6315 encodes 16S rRNA
agagtttgatcatggctcaggatgaacgctagctacaggcttaacacatgcaagtcgaggggcatcatggagtcagcttgctgactttgatggcgaccggcgcacgggtgcgtaacacgtatccaatctgcccgttactcggggatagcctttcgaaagaaagattaatacccgatgttttccgtatgccgcatgacgtacggaacaaagattcatcggtaacgg

SEQ ID NO: 3199 - DNA, 225 bp, Unknown
  bacterial strain Ascusb_3449 encodes 16S rRNA
agagtttgatcctggctcaggatgaacgctggcggcgtgcctaacacatgcaagtcgaacgaagctttttattcagagacttcggtcaatgagtaaaaatgacttagtggcggacgggtgagtaacgcgtgggcaacctgccctttactgggggacaacagttggaaacgactgctaataccgcataagcgcacagaaccgcatggtacagtgtgaaaagattta

SEQ ID NO: 3200 - DNA, 225 bp, Unknown
  bacterial strain Ascusb_1549 encodes 16S rRNA
agagtttgatcatggctcaggatgaacgctagctacaggcttaacacatgcaagtcgaggggcagcatgacgatagcttgctattgtcgatggcgaccggcgcacgggtgagtaacgcgtatccaacctgcccattactcaggtatagcccagtgaaaactggattaatccctgatgtggtctcgtgcagacatctaagcgagactaaagtttcaacggtaatgg

SEQ ID NO: 3201 - DNA, 225 bp, Unknown
  bacterial strain Ascusb_6808 encodes 16S rRNA
agagtttgatcatggctcaggacgaacgctggcggcgtgcctaacacatgcaagtcgagcggggattattgtgatgagagcttcggcaggattcgtggtaattctagcggcggacgggtgagtaacgcgtgaacaatctgtcccggacagggggataacacttggaaacaggtgctaataccgcataagaccacaggatggcatcgtccaggggtcaaaggagaa

SEQ ID NO: 3202 - DNA, 225 bp, Unknown
  bacterial strain Ascusb_8516 encodes 16S rRNA
agagtttgatcatggctcaggatgaacgctggcggcatgcctaagacatgcaagtcgaacgaggtggcccaatgaaggtggagtgcttgcacaaagctggatttggattcccacctagtggcagacgggtgagtaacacgtgggtgacctacctttaagttggggataacagttggaaacgattgctaataccgaatgtgacataactgtcgtggttatgttgaa

SEQ ID NO: 3203 - DNA, 225 bp, Unknown
  bacterial strain Ascusb_3080 encodes 16S rRNA
agagtttgatcatggctcaggatgaacgctagcggcaggcttaacacatgcaagtcgaggggcagcgcggaggtagcaatacttctggcggcgaccggcgcaagggtgcgtaacgcgtgagcaacatacccgtatcagggggataagcgatggaaacgtcgtctaataccgcataacaacagagaagacatcttttttgtttgaaagattcgtcggatacggatt

SEQ ID NO: 3204 - DNA, 225 bp, Unknown
  bacterial strain Ascusb_4528 encodes 16S rRNA
agagtttgatcctggctcaggatgaacgctggcggcgtgcttaacacatgcaagtcgaacggagttttgatgtgagcggaaagtagcttgctatggactaatcttttcaaaacttagtggcggacgggtgagtaacgcgtgggtaacctgccctgtacagggggataacagttggaaacgactgctaacaccgcataacatcgcgagggcgcatgaccttgcgat

SEQ ID NO: 3205 - DNA, 225 bp, Unknown
  bacterial strain Ascusb_3764 encodes 16S rRNA
agagtttgatcctggctcaggataaacgctggcggcgtgcgtaacacatgcaagttgagcgacgacgtttctgaagtggagacatggaagggcgagcggagcagcggacgggtgagtacaacatgagaagctgtcctgaagtgggggacaacgtctggaaacggacgctaataccccataggccgagaggttaaagccgcaaggcgctttaggaggtgctcgtgt

SEQ ID NO: 3206 - DNA, 225 bp, Unknown
  bacterial strain Ascusb_1411 encodes 16S rRNA
agagtttgatcatggctcaggatgaacgctagctacaggcttaacacatgcaagtcgaggggcagcatgtcgtgtgcttgcacacgatgatggcgaccggcgcacgggtgagtaacgcgtatccaaccttccctggggtccggaatagcccggtgaaaaccggattaatgccggatgtcgtgcgatgatggcatcagagttgcacgaaaggcttgccgcctcggg

SEQ ID NO: 3207 - DNA, 225 bp, Unknown
  bacterial strain Ascusb_1278 encodes 16S rRNA
agagtttgatcatggctcaggatgaacgctggcggcatgcctaatacatgcaagtcgaacggaaaccttcgggtttcagtggcgaacgggtgagtaacacgtaggtaacctggccatgtacccgggataatttctggaaacggaaactaaaaccggataggcaggagggaggcatcttccccctgttaaaggagcctcaaagctctggacatggatggacctgcg

SEQ ID NO: 3208 - DNA, 225 bp, Unknown
  bacterial strain Ascusb_4041 encodes 16S rRNA
agagtttgatcatggctcaggacgaacgctggcggcgtgcttaacacatgcaagtcgaacgaggttattttgatgaaatcttcggatgaaattgaaataaccgagtggcggacgggtgagtaacgcgtgagcaacctgtcttctacagggggataacgctccgaaaggagtgctaataccgcataagaccacggagccgcatggttttggggtcaaaggagaaat

SEQ ID NO: 3209 - DNA, 225 bp, Unknown
  bacterial strain Ascusb_3176 encodes 16S rRNA
agagtttgatcatggctcaggatgaacgctggcggcgtgcttaacacatgcaagtcgaacgaagcattgttgatgaagttttcggatggaatcaactttgactgagtggcggacgggtgagtaacgcgtgggtaacctgccctgtacagggggataacagttagaaatgactgctaaaaccgcataagcgcacggaaaggcatctttcagtgtgaaaaactccgg

SEQ ID NO: 3210 - DNA, 225 bp, Unknown
  bacterial strain Ascusb_4736 encodes 16S rRNA
agagtttgatcatggctcaggatgaacgctagctacaggcttaacacatgcaagtcgtggggcagcgtgagggaagcttgcttcccttgacggcgaccggcgcacgggtgagtaacgcgtatccaacctgccatatactcggggatagcccggtgaaaaccgaattaatacccgatgttgtccttagcagacatctaacgaggaccaaagcttcggcggtatatg

SEQ ID NO: 3211 - DNA, 225 bp, Unknown
  bacterial strain Ascusb_2680 encodes 16S rRNA
agagtttgatcatggctcaggatgaacgctggcggcgtgcttaacacatgcaagtcgagcgaagcatggttgatgttttcggacggatatcgtgactgagcggcggacgggtgagtaacgcgtgggtaacctgcctcacacaggggaataacagttagaaatgactgctaatgccgcataagcgcacgggaccgcatggtcctgtgtgaaaaactccggtggtgt

SEQ ID NO: 3212 - DNA, 225 bp, Unknown
  bacterial strain Ascusb_5145 encodes 16S rRNA
agagtttgatcatggctcaggacgaacgctggcggcgtgcttaacacatgcaagtcgaacggggatatccgagcggaaggcttcggccggaaggttggatattccagtggcggacgggtgagtaacgcgtgagcaacctgtcccagacagggggataacacttggaaacaggtgctaataccgcataagaccacggggtcacatggcactgaggtaaaaggagga

SEQ ID NO: 3213 - DNA, 225 bp, Unknown
  bacterial strain Ascusb_5705 encodes 16S rRNA
agagtttgatcatggctcaggatgaacgctagctacaggcttaacacatgcaagtcgaggggcagcattatcgaagcttgctttgatagatggcgaccggcgcacgggtgcgtaacacgtatccaatctacccatggctcagggatagcctttcgaaagaaagattaatacctgatggtctcacatgaagacatctttttgtgagtaaagatttatcggcgatgg

SEQ ID NO: 3214 - DNA, 225 bp, Unknown
  bacterial strain Ascusb_16569 encodes 16S rRNA
agagtttgatcatggctcaggattaacgctggcggcatgcctaagacatgcaagtcgtacgaggaagcccattgaagttggagtgcttgcacaaagatggatttggtttacttcctagtggcggacgggtgagtaacacgtgggtaatctgcctttaagttggggacaacagttggaaacgattgctaataccgaatacgatttagaaatgatttttctatattg

SEQ ID NO: 3215 - DNA, 225 bp, Unknown
  bacterial strain Ascusb_699 encodes 16S rRNA
agagtttgatcctggctcaggatgaacgctggcggcgtgcctaacacatgcaagtcgaacgaagcatactccttcgggggtatgactgagtggcggacgggtgagtaacgcgtgggtaacctgccctctacagggggacaacagttagaaatgactgctaataccgcatgagcgcacagggaggcatcttcccgtgtgaaaaactatcggtggtagaggatgggc

SEQ ID NO: 3216 - DNA, 225 bp, Unknown
  bacterial strain Ascusb_6601 encodes 16S rRNA
agagtttgatcatggctcagattgaacgctggcggcaggcttaatacatgcaagtcgaacggtagcagcaggaaggcttgcctttctggctgacgagtggcggacgggtgagtaatacctgggaaactgcctataagagggggacaacacctggaaacgggtgctaataccgcataagccctgaggggaaaaggatgggaaaccatgcgcttatagatgtgccca

SEQ ID NO: 3217 - DNA, 225 bp, Unknown
  bacterial strain Ascusb_20546 encodes 16S rRNA
agagtttgatcctggctcaggatgaacgctggcggcgtgcctaacacatgcaagtcgaacgaagcatacgggacggagattcgtcgaagccctgtatgacttagtggcggacgggtgagtaatgtatgagcaacctgcctttcagagggggacaacagttggaaacgactgctaataccgcataacattaccgggtggcatcacctggtaatcaaaggagcaatc

SEQ ID NO: 3218 - DNA, 225 bp, Unknown
  bacterial strain Ascusb_5478 encodes 16S rRNA
agagtttgatcctggctcaggacgaacgctggcggcgtgcttaacacatgcaagtcgaacgaggctgtattgggagcttgcttttgatacagccgagtggcggacgggtgagtaacgcgtgagcaacctgtctcatacagggggataacgcaccgaaaggtgtgctaataccgcataagaccacagcctcgcatgggggaggggtcaaaggagcgatccggtatg

SEQ ID NO: 3219 - DNA, 225 bp, Unknown
  bacterial strain Ascusb_5581 encodes 16S rRNA
agagtttgatcctggctcaggatgaacgctagctacaggcttaacacatgcaagtcgaggggcagcgggaaggaagcttgctttctttgccggcgaccggcgcacgggtgagtaacgcgtatccaacctgcccgcggctcagggatagcctcgtgaaaacgagattaatacctgatggtcttgttggttgacatcaactggcaagtaaagatttatcggcagcgg

SEQ ID NO: 3220 - DNA, 225 bp, Unknown
  bacterial strain Ascusb_1808 encodes 16S rRNA
agagtttgatcctggctcaggatgaacgctggcggcgtgcctaacacatgcaagtcgaacggggtattgtggaaagcggcttcggccaatggaagcgatacttagtggcggacgggtgagtaacgcgtgagcaacctgcctctgaccgggggatagcagctggaaacggctggtaataccgcataagcccacagcaccgcatggtgcagggggaaaaactccggt

SEQ ID NO: 3221 - DNA, 225 bp, Unknown
  bacterial strain Ascusb_1327 encodes 16S rRNA
agagtttgatcatggctcaggatgaacgctggcggcgtgcttaacacatgcaagtcgaacgaagccaaaaggaagcttgctttctttgaagcttagtggcggacgggtgagtaacgcgtgaggaacctgcccttcagtggggaataacagccggaaacgactgctaataccgcataacgtcgagagaccgcatgatctttcgaccaaaggatttattcgctgaag

SEQ ID NO: 3222 - DNA, 225 bp, Unknown
  bacterial strain Ascusb_3539 encodes 16S rRNA
agagtttgatcatggctcaggatgaacgctggcggcgtgcttaacacatgcaagtcgaacgggaatcactttttagcttgctaagttgtgattctagtggcggacgggtgagtaacgcgtgggtaacctgccttataccgggggacaacagttggaaacgactgctaataccgcataagcgcacagtatcgcatgatacagtgtgaaaaactccggtggtataag

SEQ ID NO: 3223 - DNA, 225 bp, Unknown
  bacterial strain Ascusb_2161 encodes 16S rRNA
agagtttgatcctggctcagaacgaacgctggcggcaggcctaacacatgcaagttgaacgggattgacggatagcttgctatttgtcatgagagtagcgcactggtgagtaacacgtgggaacataccttttagtgggggacaacagggggaaacttctgctaataccgcataaaccctgagggggaaaggagcaattcgctaaaagattggcccgcggaagat

SEQ ID NO: 3224 - DNA, 225 bp, Unknown
  bacterial strain Ascusb_3872 encodes 16S rRNA
agagtttgatcatggctcaggatgaacgctggcggcgtgcctaacacatgcaagtcgaacgaagcacttctaccggagattcgtcgaaggtggatttgacttagtggcggacgggtgagtaatgtatgagcaacctgcctttcagtgggggacaacagttggaaacgactgctaataccgcataatgtacagaaggggcatcccttttgtaccaaaggagcaatt

SEQ ID NO: 3225 - DNA, 225 bp, Unknown
  bacterial strain Ascusb_2515 encodes 16S rRNA
agagtttgatcatggctcaggacgaacgctggcggcgtgcttaacacatgcaagtcgaacgagggtagatgggagcttgctcctggctatccgagtggcggacgggtgagtaacgcgtgaataatctgtctcatacagggggataacgcatcgaaagatgtgctaataccgcgtaggaccacgatggggcatcccattgaggtgaaaggagcaatccagtatgag

SEQ ID NO: 3226 - DNA, 225 bp, Unknown
  bacterial strain Ascusb_2366 encodes 16S rRNA
agagtttgatcatggctcaggacgaacgctggcggcgtgcttaacacatgcaagtcgaacggggattagttggttgagagcttcggcaggatactgattaattctagtggcggacgggtgagtaacgcgtgagcaacctgtcccagacagggggataacacttggaaacaggtgctaataccgcataagaccacagcatcacatggtgcaggggtaaaaggagca

SEQ ID NO: 3227 - DNA, 225 bp, Unknown
  bacterial strain Ascusb_3500 encodes 16S rRNA
agagtttgatcatggctcaggatgaacgctggcggcgtgcttaacacatgcaagtcgaacggaacttttctcccgacaaagcggagagcttgctcgaagtagagtcatttgaaaagtttagtggcggacgggtgagtaacgcgtgggtaacctgccatatacagggggataacacttagaaataggtgctaataccgcataagcctacagaatcgcatgattcag

SEQ ID NO: 3228 - DNA, 225 bp, Unknown
  bacterial strain Ascusb_2249 encodes 16S rRNA
agagtttgatcatggctcaggatgaacgctggcggcgtgcttaacacatgcaagtcgaacggaggacccttgacggagttttcggacaacagataggaatccttagtggcggacgggtgagtaacgcgtgaggaacctgccttggagaggggaataacacagagaaatttgtgctaataccgcatgatgcagttgggtcgcatggctctgactgccaaagattta

SEQ ID NO: 3229 - DNA, 225 bp, Unknown
  bacterial strain Ascusb_3605 encodes 16S rRNA
agagtttgatcctggctcaggatgaacgctggcggcgtgcttaatacatgcaagtcgaacgaggtcattgagcttgcttaatgaccgagtggcgaacgggtgagtaatacgtaagcaacctgccctgaagcgggggataacagctggaaacggacgctaataccccatagcagctcagaaggcatcttcttttctctaaagatccgcttggatcacttcaggatg

SEQ ID NO: 3230 - DNA, 225 bp, Unknown
  bacterial strain Ascusb_2114 encodes 16S rRNA
agagtttgatcatggctcaggatgaacgctagctacaggcttaacacatgcaagtcgaggggcagcatggtcttagcttgctaagactgatggcgaccggcgcacgggtgagtaacgcgtatccaaccttccctatagtagagaatagcccggcgaaagtcggattaatgctctatgttattcaatgcggacatctaatttgaatcaaaggcttgccgctatagg

SEQ ID NO: 3231 - DNA, 225 bp, Unknown
  bacterial strain Ascusb_1230 encodes 16S rRNA
agagtttgatcctggctcaggatgaacgctggcggcgtgcctaacacatgcaagtcgaacgagactgagatgactaagtcttcggacaaaggaattgactgtcgagtggcggacgggtgagtaacgcgtggataacctgcctcatacagggggataacagagggaaacttctgctaataccgcataagcgcacagtaacgcatgttacagtgtgaaaaactccgg

SEQ ID NO: 3232 - DNA, 225 bp, Unknown
  bacterial strain Ascusb_2434 encodes 16S rRNA
agagtttgatcatggctcaggatgaacgctagctacaggcttaacacatgcaagtcgaggggcagcagatcgatagcttgctattgatgctggcgaccggcgcacgggtgagtaacgcgtatccaaccttccctatagtagaggatagcccggcgaaagtcggattaatactctatgttttccaatgcagacatctaagttggaacaaaggttcaccgctatagg

SEQ ID NO: 3233 - DNA, 225 bp, Unknown; identical to SEQ ID NO: 2664
  bacterial strain Ascusb_16970 encodes 16S rRNA

SEQ ID NO: 3234 - DNA, 225 bp, Unknown
  bacterial strain Ascusb_2987 encodes 16S rRNA
agagtttgatcatggctcaggatgaacgctagcggcaggcttaacacatgcaagtcgaggggcagcgagggtagcaatacctgtcggcgaccggcgaaagggtgagtaacgcgtgagcaacatacccgggaatgggggatagtcattggaaacgatgtgtaataccccataacacatgtcatcgcatgttgatatgttgaaagattcattgatcccggattggct

SEQ ID NO: 3235 - DNA, 225 bp, Unknown
  bacterial strain Ascusb_221 encodes 16S rRNA
agagtttgatcatggctcaggatgaacgctagctacaggcttaacacatgcaagtcgaggggcagcatggtcttagcttgctaagattgatggcgaccggcgcacgggtgagtaacgcgtatccaaccttccctatagtaggggatagcccgtagaaatgcggattaataccctatgttgtattttgaggacatctgacgaataccaaaggttcaccgctatagg

SEQ ID NO: 3236 - DNA, 225 bp, Unknown
  bacterial strain Ascusb_17658 encodes 16S rRNA
agagtttgatcctggctcaggatgaacgctggcggcgtgcctaacacatgcaagtcgaacggagatttgacgctgaggagacttcggtcaattcttgttaaatcttagtggcggacgggtgagtaacgcgtgggcaacctgcctcgtactgggggataacagttggaaacgactgttaataccgcataagcgcacgatatcgcatgatacagtgtgaaaaactcc

SEQ ID NO: 3237 - DNA, 225 bp, Unknown
  bacterial strain Ascusb_14232 encodes 16S rRNA
agagtttgatcctggctcaggacgaacgctggcggcgtgcttaacacatgcaagtcgaacgaggatatgattggaagtccttcggggcggaagatcatattcgagtggcggacgggtgagtaacgcgtgaacaatctgtcccggaatgggggataacacttggaaacaggtgctaataccgcataagaccacactgtcgcatggcagagaggtaaaaggagcaat

SEQ ID NO: 3238 - DNA, 225 bp, Unknown
  bacterial strain Ascusb_1484 encodes 16S rRNA
agagtttgatcatggctcaggacgaacgctggcggcacgcttaacacatgcaagtcgaacggagttaagaaggagcttgcttcatcttaacttagtggcggacgggtgagtaacacgtgagcaacctgcctttgagattgggatagcttctggaaacggatggtaataccgaataatgttgtgagaccgcatgattttacaaccaaagatttatcgctcaaagat

SEQ ID NO: 3239 - DNA, 225 bp, Unknown
  bacterial strain Ascusb_3643 encodes 16S rRNA
agagtttgatcatggctcagaacgaacgctggcggcgcgtcttaagcatgcaagtcgagcggtaagatatagcttgctatatcctagagcggcggactggtgagtaacacgtgggtgacatacccctcagaccgggatagctcctagaaataggagataataccagatacgacctatgttgtcagaggacatagaggaaagatgctacggcatcgctgaaggagt

SEQ ID NO: 3240 - DNA, 225 bp, Unknown
  bacterial strain Ascusb_20052 encodes 16S rRNA
agagtttgatcctggctcaggatgaacgctagctacaggcttaacacatgcaagtcgcggggcagcattgaggttgcttgcaacctcagatggcgaccggcgcacgggtgagtaacgcgtatccaacctcccccttagtagggaatagcccggcgaaagtcggattaatgccctatgttctccttttcgggcatcggtttaggagcaaagattcgtcgctaaggg

SEQ ID NO: 3241 - DNA, 225 bp, Unknown
  bacterial strain Ascusb_5423 encodes 16S rRNA
agagtttgatcatggctcaggatgaacgctggcggcgtgcctaacacatgcaagtcgaacggagctgtttggatgaagttttcggatggattccttgcagcttagtggcggacgggtgagtaacgcgtggataacctgccttgatccgggggatagcagttggaaacgactggtaataccgcataagcgcacggcatggcatcatgcagtgtgaaaagatttatc

SEQ ID NO: 3242 - DNA, 225 bp, Unknown
  bacterial strain Ascusb_4791 encodes 16S rRNA
agagtttgatcatggctcaggataaacgctggcggcgcacataagacatgcaagtcgaacggaagtcgtcaggaaacagattgacgatttatctgattgaagttacctgacaatggctttagtggcggactggtgagtaacacgtaagcaacctgcctatcagaggggaataacagtgagaaatcattgctaataccgcataagctagtagtatcgcatgataca

SEQ ID NO: 3243 - DNA, 225 bp, Unknown
  bacterial strain Ascusb_2021 encodes 16S rRNA
agagtttgatcatggctcaggatgaacgctggcggcgtgcttaacacatgcaagtcgaacgaagcactggcgtctgatctttcgggtgaagaggcctttgactgagtggcggacgggtgagtaacgcgtggggaacctgccccataccgggggacaacagccggaaacggctgctaataccgcataagcgcacggaagcgcatgcttttgtgtgaaaaactccgg

SEQ ID NO: 3244 - DNA, 225 bp, Unknown
  bacterial strain Ascusb_3297 encodes 16S rRNA
agagtttgatcctggctcaggacgaacgctggcggcgtgcttaacacatgcaagtcgaacggggattagttggttgagagcttcggcaggatactgattaattccagtggcggacgggtgagtaacgcgtgagcaacctgtcccagacagggggataacacttggaaacaggtgctaataccgcataagaccacggggtcacatggcccaggggtaaaaggagca

SEQ ID NO: 3245 - DNA, 225 bp, Unknown; identical to SEQ ID NO: 2345
  bacterial strain Ascusb_20167 encodes 16S rRNA

SEQ ID NO: 3246 - DNA, 225 bp, Unknown
  bacterial strain Ascusb_17906 encodes 16S rRNA
agagtttgatcctggctcaggatgaacgctagctacaggcttaacacatgcaagtcgaggggcagcacttcgggtggcgaccggcgcacgggtgagtaacgcgtatgtaacctgcccttgagtgggggatagcccatcgaaagatggattaataccgcataatgccgcggatgaacatttattggcggccaaagatttattgctcagggatggacatgcgtatga

SEQ ID NO: 3247 - DNA, 225 bp, Unknown
  bacterial strain Ascusb_3910 encodes 16S rRNA
agagtttgatcatggctcaggatgaacgctagctacaggcttaacacatgcaagtcgaggggcatcaggggattagcttgctaatcttgctggcgaccggcgcacgggtgagtaacgcgtatccaaccttccccttagtagggcatagcccggcgaaagtcggattaataccctatgttgtatattgaggacatctgattcatactaaagatttatcgctaaggg

SEQ ID NO: 3248 - DNA, 225 bp, Unknown
  bacterial strain Ascusb_3878 encodes 16S rRNA
agagtttgatcctggctcaggatgaacgctggcggcgtgcctaacacatgcaagtcgaacgaagcatcttgcccgacaaagtggagtgcttgcacaaagcggagtcaattaagatgacttagtggcggacgggtgagtaacgcgtgggtaacctgccctatacagggggataacagttagaaatgactgctaataccgcataagcgcacagtatcgcatgataca

SEQ ID NO: 3249 - DNA, 225 bp, Unknown
  bacterial strain Ascusb_19302 encodes 16S rRNA
aggtttgatcctggctcaggacgaacgctggcggcacgcctaacacatgcaagtcgaacggagattttgtttcggcagaatcctagtggcgaacgggtgagtaacgcgtaggcaacctgccctccggccggggacaacactccgaaaggggtgctaataccggatacgaagtctgtgccgcatggtacggatttgaaagatggcctctgtttacaagctatcgcc

SEQ ID NO: 3250 - DNA, 225 bp, Unknown
  bacterial strain Ascusb_2233 encodes 16S rRNA
agagtttgatcatggctcaggacgaacgctggcggcgtgcctaacacatgcaagtcgaacggacgaagggagcttgctcccctagttagtggcgaacgggtgagtaacgcgtgagcaacctgcctttcagagggggacaacggttggaaacgaccgctaataccgcatgaagcatcggggtcgcatggccttgatgttaaagatttatcgctgaaagatgggctc

SEQ ID NO: 3251 - DNA, 225 bp, Unknown
  bacterial strain Ascusb_4367 encodes 16S rRNA
agagtttgatcatggctcaggatgaacgctagctacaggcttaacacatgcaagtcgcggggcagcatgttggttgcttgcaaccgatgatggcgaccggcgcacgggtgagtaacgcgtatccaaccttccccatagtagggtacagcccggcgaaagtcggattaatgccctatgttcttcgcagatggcatctgatgtgaagcaaaggtattccgctatggg

SEQ ID NO: 3252 - DNA, 225 bp, Unknown; identical to SEQ ID NO: 2239
  bacterial strain Ascusb_2171 encodes 16S rRNA

SEQ ID NO: 3253 - DNA, 225 bp, Unknown
  bacterial strain Ascusb_1944 encodes 16S rRNA
agagtttgatcatggctcaggacgaacgctggcggcgtgcctaacacatgcaagtcgaacggagttattttgaaggatcccttcggggagacggatttttaacttagtggcggacgggtgagtaacgcgtgagtaacctgcctccgagaggggaataacgttctgaaaagaacgctaataccgcataacatattgaagtcgcatggctttgatatcaaagatttt

SEQ ID NO: 3254 - DNA, 225 bp, Unknown
  bacterial strain Ascusb_2619 encodes 16S rRNA
agagtttgatcatggctcaggacgaacgctggcggcgtgcttaacacatgcaagtcgaacgaggattataggaatgagagcttcggcaggatttccggtaattcgagtggcggacgggtgagtaacgcgtgaacaatctgtcccagacagggggataacacttggaaacaggtgctaataccgcataagaccacggcatcgcatggtgcaggggtaaaaggagcg

SEQ ID NO: 3255 - DNA, 225 bp, Unknown
  bacterial strain Ascusb_2877 encodes 16S rRNA
agagtttgatcatggctcagaacgaacgctggcggcgcgtcttaagcatgcaagtcgaatggcaagattggtgcttgcaccgatcctagaatggcagactggtgagtaacacgtgggtgacataccctctggatggggacagctgttagaaatagcaggtaataccgaataagcttgtgcaggttagagtggcataaggaaaggtgctccggcaccaccagagga

SEQ ID NO: 3256 - DNA, 225 bp, Unknown
  bacterial strain Ascusb_5266 encodes 16S rRNA
agagtttgatcctggctcaggatgaacgctggcggcgtgcttaacacatgcaagtcgaacggaggacccctgaacaagttttcggacaagggaagggaatccttagtggcggacgggtgagtaacgcgtgaggaacctgccttggagaggggaataacacagagaaatttgtgctaataccgcatgacgcagtactatcgcatggtagaactgccaaagatttat

SEQ ID NO: 3257 - DNA, 225 bp, Unknown
  bacterial strain Ascusb_3752 encodes 16S rRNA
agagtttgatcatggctcaggatgaacgctagcggcaggcctaacacatgcaagtcgaggggcagcgcggggtagcaataccctggcggcgaccggcgcacgggtgcgtaacgcgtatacaacctaccctaaacagggggataacggggggaaacctccactaataccccatattgtcgagccatcgcctggtggttcgtcgaaagcttcggcggttctggatgg

SEQ ID NO: 3258 - DNA, 225 bp, Unknown
  bacterial strain Ascusb_2779 encodes 16S rRNA
agagtttgatcatggctcaggatgaacgctagctacaggcttaacacatgcaagtcgaggggcatcatggtgtgtgcttgcacgcaccgatggcgaccggcgcacgggtgcgtaacacgtatccaacctacccatggctcagggatagccttccgaaagaaagattaatacctgatggtctcgtgtcgggacatcccgttgcgagtaaagattcatcggcgatgg

SEQ ID NO: 3259 - DNA, 225 bp, Unknown
  bacterial strain Ascusb_11196 encodes 16S rRNA
agagtttgatcatggctcaggataaacgctggcggcgcacataagacatgcaagtcgaacggaagtcgttgtaatgatgtggacatgaacagagaacttgttcaaagggagtgaaaattgacttacaacaatggctttagtggcggactggtgagtaatgtataagtaacctgcctatcagaggggaacaacagttggaaacgactgctaataccgcatatgcca

SEQ ID NO: 3260 - DNA, 225 bp, Unknown
  bacterial strain Ascusb_12977 encodes 16S rRNA
agagtttgatcatggctcaggatgaacgctagctacaggcttaacacatgcaagtcgaggggcagcattaagttagcttgctaacttagatggcgaccggcgcacgggtgagtaacgcgtatccaaccttccccctgctcagggatagcccgctgaaaggcggattaacacctgatagcttcactagatggcatctgacggtgaataaagtttacggcaagggat

SEQ ID NO: 3261 - DNA, 225 bp, Unknown
  bacterial strain Ascusb_15604 encodes 16S rRNA
agagtttgatcctggctcaggatgaacgctagcgacaggcctaacacatgcaagtcgaggggcagcacttcgggtggcgaccggcgcacgggtgagtaacgcgtatgtaacctgcccttgagtgtgggatagcccatcgaaagatggattaataccgcataatgccgcggatgaacatttattagcggccaaagatttattgctcagggatggacatgcgtatga

SEQ ID NO: 3262 - DNA, 225 bp, Unknown
  bacterial strain Ascusb_1921 encodes 16S rRNA
agagtttgatcatggctcaggacgaacgctggcggcgtgcctaacacatgcaagtcgaacggaactctttggatcgagacttcggtcaagtgaaactgagtttagtggcggacgggtgagtaacgcgtgaggaacctgcctcggagtgggggacaacagttggaaacgactgctaataccgcataatgtgctggagggacatccctctggtaccaaagctttatg

SEQ ID NO: 3263 - DNA, 225 bp, Unknown
  bacterial strain Ascusb_3969 encodes 16S rRNA
agagtttgatcctggctcaggatgaacgctggcggcgcgcctaatacatgcaagtcgaacgggaggtagcaatacctctagtggcgaacgggtgagtaacacgttgggaatctaccccctagaccgggatacccagtcgaaagattggctaataccggatatgatgcatttacacaagtagatgtattgaaagggagctttcaagcttcgcttagggatgaacct

SEQ ID NO: 3264 - DNA, 225 bp, Unknown
  bacterial strain Ascusb_20599 encodes 16S rRNA
agagtttgatcatggctcaggatgaacgctggcggcgtgcctaatacatgcaagtcgagcgagaatcagggatgtagagattcgtcaaagcggaactgaggaaagcggcggacgggtgagtaacgcgtaggcaacctgcccttagcagagggatagccattggaaacgatgattaaaacctcataatgctgttgaaacacatgttttgacagccaaagatttatc

SEQ ID NO: 3265 - DNA, 225 bp, Unknown
  bacterial strain Ascusb_4206 encodes 16S rRNA
agagtttgatcctggctcagagttaacgctggcatcgtgcataacacatgcaagtcgaacgggacttagtttgtagcttgctatagattaagtttagtggcagacgggtgagtaatgtataaggaacctacctccgagtggggaataacggtccgaaaggatcgctaataccccataacatattagagaggcatctctctaatatcaaagattcatcgcttggag

SEQ ID NO: 3266 - DNA, 225 bp, Unknown
  bacterial strain Ascusb_1520 encodes 16S rRNA
agagtttgatcctggctcaggacgaacgctggcggcacgcttaacacatgcaagtcgaacggggttattcggagcttgctttgaataacttagtggcggacgggtgagtaacacgtgagcaatctgcccttaagagggggataccgattggaaacgatcgttaataccgcataagatagtagtatcgcatgatacagctataaaagatttatcgcttaaggatga

SEQ ID NO: 3267 - DNA, 225 bp, Unknown
  bacterial strain Ascusb_3474 encodes 16S rRNA
agagtttgatcctggctcagaacgaacgctggcggcgcgtcttaagcatgcaagtcgagcggtaagttgtagcttgctacaacctagagcggcggactggtgagtaacgcgtgggtgacgtacccttttgacggggatagctcctagaaataggaggtaataccggataagctcgtatgtgtcagaggcatacgaggaaaggttcttttgaaccgcagaaggaac

SEQ ID NO: 3268 - DNA, 225 bp, Unknown
  bacterial strain Ascusb_896 encodes 16S rRNA
agagtttgatcatggctcaggatgaacgctggcggcgtgcttaacacatgcaagtcgaacgaggctgcagattggaagttttcggatggaagatgtgcagaccgagtggcggacgggtgagtaacgcgtggggaacctgccccattccgggggataccagttggaaacgactgttaataccgcataagcgcacgggaggacatcctccagtgtgaaaaactgagg

SEQ ID NO: 3269 - DNA, 225 bp, Unknown
  bacterial strain Ascusb_1305 encodes 16S rRNA
agagtttgatcctggctcaggatgaacgctggcggcgtgcctaacacatgcaagtcgaacggtgatgattgatattttcggatggatttcatcatagtggcggacgggtgagtaacgcgtggataacctgcctcgtactggggaatagcagctggaaacggctggtaataccgcataagcgcacgatgccgcatgacattgtgtgaaaagatttatcggtacgag

SEQ ID NO: 3270 - DNA, 225 bp, Unknown
  bacterial strain Ascusb_723 encodes 16S rRNA
agagtttgatcatggctcaggacgaacgctggcggcatgcctaacacatgcaagtcgaacggagatttagagagcttgctttttaaatcttagtggcggacgggtgagtaacgcgtgagcaacctacctttcagtggggaataatgttttgaaaaggacactaataccgcataacgtatttaagtcgcatggcatagataccaaaggatttattcgctgagagat

SEQ ID NO: 3271 - DNA, 225 bp, Unknown
  bacterial strain Ascusb_3011 encodes 16S rRNA
agagtttgatcatggctcaggatgaacgctggcggcgtgcctaacacatgcaagtcgaacggagatagaacgctgtcgagacttcggtcaaaacttgttttatcttagtggcggacgggtgagtaacgcgtggagaacctgcctcgtactgggggataacagttggaaacgactgataataccgcataagcccacgagaccgcatggtcatgagggaaaagattt

SEQ ID NO: 3272 - DNA, 225 bp, Unknown
  bacterial strain Ascusb_834 encodes 16S rRNA
agagtttgatcctggctcaggatgaacgctggcggcgtgcttaacacatgcaagtcgaacgagggttgccagttgaaattttcggatggaaacaggcaatgcctagtggcggacgggtgagtaacgcgtggggaacctgccccattccgggggataccagttggaaacgactgttaataccgcataagcgcacggaaggacatccttccgtgtgaaaaaccacgg

SEQ ID NO: 3273 - DNA, 225 bp, Unknown
  bacterial strain Ascusb_3300 encodes 16S rRNA
agagtttgatcatggctcagaacgaacgctggcggcgcgtcttaagcatgcaagtcgagcggtaagattggtgcttgcactaatcctagagcggcggactggtgagtaacgcgtgggtgacgtacctttgtgacggggacagctcctagaaataggagataataccggatacgctgcatgttgtcagaggacatgcaggaaaggatcttttgattcgcacgaaga

SEQ ID NO: 3274 - DNA, 225 bp, Unknown
  bacterial strain Ascusb_1442 encodes 16S rRNA
agagtttgatcatggctcaggatgaacgctagcggcaggcttaacacatgcaagtcgaggggcagcgcggttgtagcaatacgactggcggcgaccggcgaaagggtgcgtaacgcgtgagcgacatgcccgtcaccggggtataaccgatggaaacgtcgactaatcccccataacatcagaggaggcatcttctttggttgaaattcacggaggtgacggatt

SEQ ID NO: 3275 - DNA, 225 bp, Unknown
  bacterial strain Ascusb_1976 encodes 16S rRNA
agagtttgatcatggctcaggatgaacgctggcggcgtgcctaacacatgcaagtcgaacggagatatagtagaaagagacttcggtcaatggatgttatatcttagtggcggacgggtgagtaacgcgtggggaacctgccctgtactgggggataacagtgagaaatcactgctaaaaccgcataagcgcacactggcgcatgccagagtgtgaaaaactccg

SEQ ID NO: 3276 - DNA, 225 bp, Unknown
  bacterial strain Ascusb_391 encodes 16S rRNA
agagtttgatcatggctcaggatgaacgctggcggcgtgcttaacacatgcaagtcgaacggggcacccttgacagaggcttcggccaattgataggaatgcctagtggcggacgggtgagtaacgcgtgagtaacctgcctgggagtggggaataacacatcgaaaggtgtgctaataccgcataacacagtaggatcgcatggttttactgtcaaagatttat

SEQ ID NO: 3277 - DNA, 225 bp, Unknown
  bacterial strain Ascusb_4971 encodes 16S rRNA
agagtttgatcctggctcaggatgaacgctggcggcgtgcttaacacatgcaagtcgaacgaagcaccctcatccgtggaagggagtagcttgctacgaacggacacacccgagggtgactgagtggcggacgggtgagtaacgcgtgggtaacctgccccatagagggggacaacagttagaaatgactgctaataccgcatagtaatgcagatccgcatgctt

SEQ ID NO: 3278 - DNA, 225 bp, Unknown
  bacterial strain Ascusb_5917 encodes 16S rRNA
agagtttgatcatggctcaggatgaacgctagcggcaggcttaacacatgcaagtcgaggggcagcgcgggtagcaatacctggcggcgaccggcggaagggtgcgtaacacgtgagcaacttgcccgtcacagggggataagcgctggaaacggtgtctaatatcccataacatatcgtatcgcatggtacgacattgaaaactccggtggtgacggatgggct

SEQ ID NO: 3279 - DNA, 225 bp, Unknown
  bacterial strain Ascusb_472 encodes 16S rRNA
agagtttgatcatggctcaggatgaacgctggcggcgtgcttaatacatgcaagtcgaacgaagacatctcgccgaagcttgcttcattgagatatcttagtggcggacgggtgagtaacgcgtgggtaacctgccttacacagggggataacagttagaaatgactgctaataccgcataagcgcacattatcgcatgatagagtgtgaaaagatttatcggtg

SEQ ID NO: 3280 - DNA, 225 bp, Unknown
  bacterial strain Ascusb_551 encodes 16S rRNA
agagtttgatcatggctcaggacgaacgctggcggcacgcttaacacatgcaagtcgaacggagatattttggtttactgagatatcttagtggcggacgggtgagtaacacgtgagcaacctgcctttgagagagggatagcttctggaaacggatggtaatacctcatgacatacttttatcgcatggtagaagtatcaaagatttatcactcagagatgggc

SEQ ID NO: 3281 - DNA, 225 bp, Unknown
  bacterial strain Ascusb_12676 encodes 16S rRNA
agagtttgatcctggctcaggacgaacgctggcggcgtgcctaacacatgcaagtcgaacggagttatgtcacgaagttcttcggagcggacgatatagcttagtggcggacgggtgagtaacgcgtgagcaacctgcctttcagagggggacaacggttggaaacgaccgctaataccgcatgacatgactggaccgcatgatccggtcatcaaagattttatc

SEQ ID NO: 3282 - DNA, 225 bp, Unknown; identical to SEQ ID NO: 2757
  bacterial strain Ascusb_386 encodes 16S rRNA

SEQ ID NO: 3283 - DNA, 225 bp, Unknown
  bacterial strain Ascusb_820 encodes 16S rRNA
agagtttgatcatggctcaggatgaacgctagcggcaggcttaacacatgcaagtcgaggggcagcgcgaggtagcaatactttggcggcgaccggcggaagggtgcgtaacgcgtgagcaacatgcccgtatgagggggatagtcattggaaacgatgcgtaataccccgtaacaacagttttcgcatggagattgtttgaaagattcatcgcatacggattgg

SEQ ID NO: 3284 - DNA, 225 bp, Unknown
  bacterial strain Ascusb_2469 encodes 16S rRNA
agagtttgatcatggctcaggatgaacgctggcggcgtgcttaacacatgcaagtcgaacggagcttttaaggaacaagacttcggtcaagtgagatttaagcttagtggcggacgggtgagtaacgcgtgagcaacctgcctttcagagggggataacgtttggaaacagacgctaataccgcatgacatagttttttcgcatggagagactatcaaaggagca

SEQ ID NO: 3285 - DNA, 225 bp, Unknown
  bacterial strain Ascusb_3858 encodes 16S rRNA
agagtttgatcatggctcaggattaacgctggcggcatgcctaatacatgcaagtcgaacgagcagcaatgctagtggcgaacgggtgagtaacacgtaggaaacctgccctttagacgaggataactattggaaacgatagctaaaactggatagtatacaagaaggcatcttcatgtatttaaaggtcctgcaagggaacactaaaggatggtcctgcggaac

SEQ ID NO: 3286 - DNA, 225 bp, Unknown
  bacterial strain Ascusb_1386 encodes 16S rRNA
agagtttgatcatggctcaggacgaacgctggcggcgtgcttaacacatgcaagtcgaacgaggttataggagagcttgctcgaatatagccgagtggcggacgggtgagtaacgcgtgaacaatctgtctcatacaggggaataacgcatcgaaagatgtgctaataccgcataggaccacggtatcgcatggtactgaggtgaaaggagcaatccggtatgag

SEQ ID NO: 3287 - DNA, 225 bp, Unknown
  bacterial strain Ascusb_2085 encodes 16S rRNA
agagtttgatcatggctcaggatgaacgctggcggcgtgcctaacacatgcaagtcgaacgaagcatatacggcagaacttttcggagtgaagcggtttatgacttagtggcggacgggtgagtaacgcgtgggcaacctgcccttaaccgggggacaacagttggaaacggctgctaataccgcataagcgcacggaaccgcatggttcagtgtgaaaaattcc

SEQ ID NO: 3288 - DNA, 225 bp, Unknown
  bacterial strain Ascusb_13870 encodes 16S rRNA
agagtttgatcatggctcaggacgaacgctggcggcgtgcttaacacatgcaagtcgaacggggatcattcagatgagagcttcggcaggaatcgggatgattcgagtggcggacgggtgagtaacgcgtgagcaacctgtcccagacagggggataacacttggaaacaggtgctaataccgcataagaccacggggtcgcatggccctggggtaaaaggagca

SEQ ID NO: 3289 - DNA, 225 bp, Unknown
  bacterial strain Ascusb_5875 encodes 16S rRNA
agagtttgatcatggctcaggatgaacgctggcggcgtgcctaacacatgcaagtcgagcgagatgcttatgattgaaacttcggttgattgaatgagcggaaagcggcggacgggtgagtaacgcgtaggcaacctgccctcagcagggggatagccattggaaacgatgattaagaccccataatacagacatttcacatgtaatgtctgccaaaggtttatc

SEQ ID NO: 3290 - DNA, 225 bp, Unknown
  bacterial strain Ascusb_3653 encodes 16S rRNA
agagtttgatcctggctcaggatgaacgctggcggcgtgcctaatacatgcaagtcgagcgagaatcagttgaacagagattcgtcaaagtgatactgaggaaagcggcggacgggtgagtaacgcgtaggcaacctgcccttagcagagggatagccattggaaacgatgattaaaacctcataatgctgagctgacacatgtcagctttgccaaagatttatc

SEQ ID NO: 3291 - DNA, 225 bp, Unknown; identical to SEQ ID NO: 2426
  bacterial strain Ascusb_14287 encodes 16S rRNA

SEQ ID NO: 3292 - DNA, 225 bp, Unknown
  bacterial strain Ascusb_1551 encodes 16S rRNA
agagtttgatcatggctcaggatgaacgctggcggcgtgcctaacacatgcaagtcgaacgaagcatcttccttcggggagatgactgagtggcggacgggtgagtaacgcgtgggtaacctgccctttacagggggacaacagtcagaaatgactgctaataccgcatgagcgcacgagggggcatcctcttgtgtgaaaaactgaggtggtaaaggatgggcc

SEQ ID NO: 3293 - DNA, 225 bp, Unknown
  bacterial strain Ascusb_2384 encodes 16S rRNA
agagtttgatcatggctcaggatgaacgctggcggcgcgcctaacacatgcaagtcgaacggttaaagcaccttcgggtgtgtatagagtggcgaacggctgagtaacacgtgggcaacctgcccctcgcaccggaatagccggcggaaacgccgggtaatgccggatacgccccaggggggacatcctccccgggggaaagcccagacggcgagggatgggccc

SEQ ID NO: 3294 - DNA, 225 bp, Unknown
  bacterial strain Ascusb_5597 encodes 16S rRNA
agagtttgatcctggctcaggacgaacgctggcggcgtgcctaacacatgcaagtcgaacggagttagcttgaatgaaattttcggattgaattcggttaacttagtggcggacgggtgagtaacgcgtgagtaacctgcccacaagagggggataacgtcttgaaaaagacgctaataccgcataacatatcgaagccgcatgactttgatatcaaaggaggaa

SEQ ID NO: 3295 - DNA, 225 bp, Unknown
  bacterial strain Ascusb_3149 encodes 16S rRNA
agagtttgatcatggctcaggatgaacgctagctacaggcttaacacatgcaagtcgcggggcagcatggtcttagcttgctaggactgatggcgaccggcgcacgggtgagtaacgcgtatccaacctaccccttagtagggcatagcccggcgaaagtcggattaataccctatgttgtcagtcgaggacatctgaagttgactaaagacttgtcgctaaggg

SEQ ID NO: 3296 - DNA, 225 bp, Unknown
  bacterial strain Ascusb_4331 encodes 16S rRNA
agagtttgatcatggctcaggataaacgctggcggcgtgcttaacacatgcaagtcgaacggagtattcctcccgagaccaaggaagcttgcttctgaggaatcatttggaatacttagtggcggacgggtgagtaacgcgtgggtaacctgccctatacagggggataacagctggaaacggctgttaataccgcataagcgcacagtatcgcatggtacagtg

SEQ ID NO: 3297 - DNA, 225 bp, Unknown
  bacterial strain Ascusb_16062 encodes 16S rRNA
agagtttgatcatggctcagaacgaacgctggcggcgcgtcttaagcatgcaagtcgagcggtaagttggaagcttgcttctgacctagagcggcggactggtgagtaacgcgtgggtgatgtacctttgtgacggggacagctgctagaaatagcagataataccggatacgctgcagcatgtcagaggtgctgcaggaaaggatcttttgattcgcacagaga

SEQ ID NO: 3298 - DNA, 225 bp, Unknown
  bacterial strain Ascusb_13890 encodes 16S rRNA
agagtttgatcatggctcaggatgaacgctggcggcatgcctaagacatgcaagtcgaacgaagtgaccttttgaagcggagtgcttgcacaaagtagataaagattttcacttagtggcgcaagggtgagtaacacgtgggttatctgccttttagactgggataacaattagaaatgattgctaataccggatgataaataagaagatacgttttcttatttt

SEQ ID NO: 3299 - DNA, 225 bp, Unknown
  bacterial strain Ascusb_9421 encodes 16S rRNA
agagtttgatcctggctcaggatgaacgctagcggcaggcttaacacatgcaagtcgaggggcagcgcggggtagcaatactctggcggcgaccggcgaaagggtgcggaacacgtgagcaacttgcccgtgacagggggataagcgctggaaacggcgtctaatatcccgtaatacagaggagggcatcctcctctgttgaaagctacggtggtcacggatggg

SEQ ID NO: 3300 - DNA, 225 bp, Unknown
  bacterial strain Ascusb_1642 encodes 16S rRNA
agagtttgatcatggctcagaacgaacgctggcggcgcgtcttaagcatgcaagtcgagcggtaagattggtgcttgcaccgatcctagagcggcggactggtgagtaacgcgtgggtgacgtacccttttgacggggatagctcctagaaataggaggtaataccggataagctcgtatgtgtcagaggcatacgaggaaaggttcttttgaaccgcgaaagga

SEQ ID NO: 3301 - DNA, 225 bp, Unknown
  bacterial strain Ascusb_6078 encodes 16S rRNA
agagtttgatcctggctcaggatgaacgctagctacaggcttaacacatgcaagtcgaggggcagcatgatcttagcttgctaagattgatggcgaccggcgcacgggtgcgtaacgcgtatccaacctgccgtgtactctgggatagccctctgaaaggaggattaataccggatgtggttgcggagagacatctctctgtaattaaagatttatcggtacacc

SEQ ID NO: 3302 - DNA, 225 bp, Unknown
  bacterial strain Ascusb_7274 encodes 16S rRNA
agagtttgatcatggctcaggatgaacgctggcggcgtgcctaacacatgcaagtcgaacggagcatagacgctgtgagaagaatcagcttgctgaggaaacgaacttgtttatgcttagtggcggacgggtgagtaacgcgtggataacctggctcacacagggggatagcagttggaaacgactgataataccgcataagcgcacagcatcgcatgatggagt

SEQ ID NO: 3303 - DNA, 225 bp, Unknown
  bacterial strain Ascusb_1340 encodes 16S rRNA
agagtttgatcatggctcaggattaacgctagcggtatgcctaatacatgcaagtcgagcgggagcagcaatgctctagcggcaaacgggtgagtaatacgtatctaatctaccctttagaaaggaacaacagatcgaaagatttgctaataccttataggacatagatttacatgaaactatgtttaaagttccgttcggaacgctttaggatgagggtgcggc

SEQ ID NO: 3304 - DNA, 225 bp, Unknown
  bacterial strain Ascusb_4958 encodes 16S rRNA
agagtttgatcatggctcaggatgaacgctggcggcgtgcttaacacatgcaagtcgaacgaagcactggaagcggatttcttcgggatgaagcatcctttgacttagtggcggacgggtgagtaacgcgtgggcaacctgccgtatgcagggggacaacagctggaaacggctgctaataccgcataagcgcacgatgccgcatggcaacgtgtgaaaagattt

SEQ ID NO: 3305 - DNA, 225 bp, Unknown
  bacterial strain Ascusb_794 encodes 16S rRNA
agagtttgatcatggctcaggatgaacgctagctacaggcttaacacatgcaagtcgaggggcatcgagaggttagcttgctaaccttgtcggcgaccggcgcacgggtgagtaacgcgtatccaaccttccccttagtagggcatagcccgatgaaaatcggattaagaccctatgttcttcgtagatggcatctgaaatgaagcaaaggtttaccgctaaggg

SEQ ID NO: 3306 - DNA, 225 bp, Unknown
  bacterial strain Ascusb_3631 encodes 16S rRNA
agagtttgatcatggctcaggatgaacgctagctacaggcttaacacatgcaagtcgaggggcagcatgattctagcttgctagaatcgatggcgaccggcgcacgggtgagtaacgcgtatccaaccttccctatagtagaggatagcccggcgaaagtcggattaatactctatgttgttcaatgcggacatctaagttgaaccaaaggcttgccgctatagg

SEQ ID NO: 3307 - DNA, 225 bp, Unknown
  bacterial strain Ascusb_12333 encodes 16S rRNA
agagtttgatcctggctcaggatgaacgctggcggcatgcctaagacatgcaagtcgaacgaagtgaccttttgaaacgaagtgcttgcacggagcggataaagattttcacttagtggcgcaagggtgagtaacacgtgggttatctgccttttagactgggataacaattagaaatgattgctaataccggatgataaatagaaagatacgtttttctatttt

SEQ ID NO: 3308 - DNA, 225 bp, Unknown
  bacterial strain Ascusb_136 encodes 16S rRNA
agagtttgatcatggctcaggatgaacgctagctacaggcttaacacatgcaagtcgaggggcagcataacgaaagcttgcttttgttgatggcgaccggcgcacgggtgagtaacgcgtatccaaccttccctatactagaggatagcccggcgaaagtcggattaatactctatgttcttcgtagaagacatctgaaatgaagcaaaggtttaccggtatagg

SEQ ID NO: 3309 - DNA, 225 bp, Unknown
  bacterial strain Ascusb_9570 encodes 16S rRNA
agagtttgatcctggctcaggatgaacgctagcggcaggcttaacacatgcaagtcgaggggcagcgcggggtagcaataccctggcggcgaccggcgcacgggtgcgtaacgcgtatgcaacctgcccgtaacaggggtataacggggagaaatccccactaatcccccatattgtcctggggccgcatggtcttaggacgaaagccttggtggttacggacgg

SEQ ID NO: 3310 - DNA, 225 bp, Unknown
  bacterial strain Ascusb_2776 encodes 16S rRNA
agagtttgatcctggctcagaacgaacgctggcggcaggcttaacacatgcaagttgaacgggattgttggatagcttgctatttaacatgagagtagcgcactggtgagtaacacgtgggaacatgcctattggtgggggacaacagttggaaacgactgctaataccgcataagccctaagggggaaagatttattgccgatagattggcccgcggaagatta

SEQ ID NO: 3311 - DNA, 225 bp, Unknown
  bacterial strain Ascusb_1135 encodes 16S rRNA
agagtttgatcctggctcaggatgaacgctggcggcacgcttaacacatgcaagtcgagcggaaacggatacttcggtaactgttttagcggcggacgggtgagtaacacgtgggtaacctaccctatacagggggataacgtaaagaaatttacgctaataccgcataagccaacagggaggcatcttctggttggaaaagccgagacggtataggatgggccc

SEQ ID NO: 3312 - DNA, 225 bp, Unknown
  bacterial strain Ascusb_3321 encodes 16S rRNA
agagtttgatcatggctcaggatgaacgctggcggcacgcttaacacatgcaagtcgagcgagggaggggcttcggccccgacctagcggcggacgggtgagtaacacgtgggtaacctaccctacaccgggggataacatatagaaatgtatgctaataccgcataagccaacagggacgcatgttccggttggaaaagttccggcgatgtaggatgggcccgc

SEQ ID NO: 3313 - DNA, 225 bp, Unknown
  bacterial strain Ascusb_15140 encodes 16S rRNA
agagtttgatcctggctcaggatgaacgctagcggcaggcttaacacatgcaagtcgaggggcagcaggcggtagcaatactgtgctggcgaccggcgcacgggtgcgtaacgcgtatgcaacctacccactacagggggataacggagggaaacttccactaatatcccatggagttgttttttcgcatggagagacaactaaagctacggtggtagtggatgg

SEQ ID NO: 3314 - DNA, 225 bp, Unknown
  bacterial strain Ascusb_1991 encodes 16S rRNA
agagtttgatcatggctcagaacgaacgctggcggcatggattaggcatgcaagtcgaacgggagcagcaatgctccagtggcgcaagggtgaggaacacgtgaacaacctgccttcgagttggggatagcttctggaaacgggagataataccgaataacatcattttctcgcatggggatttgatcaaagcagcaatgcgcttgaagaggggttcgcgtccca

SEQ ID NO: 3315 - DNA, 225 bp, Unknown
  bacterial strain Ascusb_1001 encodes 16S rRNA
agagtttgatcatggctcaggatgaacgctggcggcgtgcttaacacatgcaagtcgaacggaaactactcgctgaagcgagcttgctcaattcttgagtagttttagtggcggacgggtgagtaacgcgtgggtaacctgccatgtactgggggacaacagttggaaacgactgctaataccgcataagcgcacaggaccgcatggtctagtgtgaaaaactcc

SEQ ID NO: 3316 - DNA, 225 bp, Unknown
  bacterial strain Ascusb_181 encodes 16S rRNA
agagtttgatcatggctcaggatgaacgctggcggcgtgcttaacacatgcaagtcgaacgagggttatcggttgaagttttcggatggaaactgataattcctagtggcggacgggtgagtaacgcgtggggaacctgccccattccgggggataccagttggaaacgactgttaataccgcataagcgcacagcattgcatgatgcagtgtgaaaaactccgg

SEQ ID NO: 3317 - DNA, 225 bp, Unknown
  bacterial strain Ascusb_468 encodes 16S rRNA
agagtttgatcatggctcaggatgaacgctagctacaggcttaacacatgcaagtcgaggggcagcatgagattagcttgctaatcttgatggcgaccggcgcacgggtgagtaacgcgtatccaaccttccccttagtagggcatagcccggcgaaagtcggattaataccctatgttgtatattgaggacatctgatttatactaaagatttatcgctaaggg

SEQ ID NO: 3318 - DNA, 225 bp, Unknown
  bacterial strain Ascusb_1834 encodes 16S rRNA
agagtttgatcctggctcaggatgaacgctggcggcgtgcttaacacatgcaagtcgaacgaagctcttctaacagatccttcgggtgaagatagaagatgactgagtggcggacgggtgagtaacgcgtgggaaacctgccctatgcagggggataacagttggaaacgactgctaataccgcataagcgcacagcatcgcatggtgcagtgtgaaaagccttt

SEQ ID NO: 3319 - DNA, 225 bp, Unknown
  bacterial strain Ascusb_1508 encodes 16S rRNA
agagtttgatcatggctcaggatgaacgctggcggcatgcctaatacatgcaagtcgaacgggagtgcttgcactccagtggcgaacgggtgagtaatacataggtaacctgtccttaagacgaggatagcttctagaaatggaagataaaactggataggacatcacaaatcacatgattagatgtttaaaagagcaatctacttaaggaggggcctgtggcgc

SEQ ID NO: 3320 - DNA, 225 bp, Unknown
  bacterial strain Ascusb_3684 encodes 16S rRNA
agagtttgatcctggctcaggatgaacgctggcggcgtgcttaacacatgcaagtcgaacgaagcaccttgcccgatgatatggagtgcttgcacaaagtggattcaactaaggtgactgagtggcggacgggtgagtaacgcgtgggtaacctaccccagacagggggataacagttagaaatgactgctaacaccgcataagcgcacaggaaggcatcttccg

SEQ ID NO: 3321 - DNA, 225 bp, Unknown
  bacterial strain Ascusb_2132 encodes 16S rRNA
agagtttgatcctggctcaggatgaacgctggcggcgtgcttaacacatgcaagtcgaacggagtattgacgctgaacgattgactagcttgctaagattgagttcttgttgatacttagtggcggacgggtgagtaacgcgtgggtaacctgccgtatgcagggggacaacagttggaaacgactgctaataccgcatatgcacacagtaaggcatcttacagg

SEQ ID NO: 3322 - DNA, 225 bp, Unknown
  bacterial strain Ascusb_1810 encodes 16S rRNA
agagtttgatcatggctcaggacgaacgctggcggcacgcttaacacatgcaagtcgaacggggtaaaagagcttgctcttttacttagtggcggacgggtgagtaacacgtgagcaacctacctctgagagcggaatagcttctggaaacggatggtaataccgcataacattgcgaaaccgcatgattttgcaatcaaatgaaattcgctcagagatgggctc

SEQ ID NO: 3323 - DNA, 225 bp, Unknown
  bacterial strain Ascusb_2875 encodes 16S rRNA
agagtttgatcatggctcaggacgaacgctggcggcacgcttaacacatgcaagtcgaacggtgaaggtgcttcggcaccggatcagtggcggacgggtgagtaacacgtgagcaatctgcctttaagaggggaataacgactggaaacggtcggtaataccgcataatatagagaaaccgcatgatttttctatcaaagattttatcgcttagagatgagctcg

SEQ ID NO: 3324 - DNA, 225 bp, Unknown
  bacterial strain Ascusb_156 encodes 16S rRNA
agagtttgatcctggctcaggacgaacgctggcggcacgcttaacacatgcaagtcgaacggtgaaatggtgcttgcaccatggatcagtggcggacgggtgagtaacacgtgagcaatctgccttcgggtgggggataccagttggaaacgactgttaataccgcataacatagcgaaaccgcatgattttgctatcaaagatttattgcctgaagatgagctc

SEQ ID NO: 3325 - DNA, 225 bp, Unknown
  bacterial strain Ascusb_6727 encodes 16S rRNA
agagtttgatcatggctcaggatgaacgctggcggcatgcctaagacatgcaagtcgaacgaagtgacccaacaatgatggagtgcttgcacaaaatctgcgatggatttttcacttagtggcagacgggtgagtaacacgtaagtaatctacctttaagactgggataacgtttggaaacgaacgctaataccggatgattcataattagataactatttatgc

SEQ ID NO: 3326 - DNA, 225 bp, Unknown
  bacterial strain Ascusb_967 encodes 16S rRNA
agagtttgatcctggctcagagttaacgctggcatcgtgcataacacatgcaagtcgaacgggactttgctttgtagcaatacagagtaaagtttagtggcagacgggtgagtaatgtataaggaacctaccttcgagtggggaataacagtccgaaaggattgctaataccccataacataacctagtggcatcacttagttatcaaagatttatcgcttgaag

SEQ ID NO: 3327 - DNA, 225 bp, Unknown
  bacterial strain Ascusb_8024 encodes 16S rRNA
agagtttgatcctggctcaggatgaacgctagcggcaggcctaacacatgcaagtcgaggggtaacgcgaggtagcaataccttggcgacgaccggcgcacgggtgcgtaacgcgtatgcaacctgccctgtacagggggataacggggtgaaaatcccactaatatcccatggtgtcgcgaggccgcatggttttgtgactaaagcttcggtggtacaggatgg

SEQ ID NO: 3328 - DNA, 225 bp, Unknown
  bacterial strain Ascusb_1041 encodes 16S rRNA
agagtttgatcatggctcaggatgaacgctggcggcgtgcttaacacatgcaagtcgaacggactttatatgaagcctagcgattataaagttagtggcggacgggtgagtaacgcgtgggtaacctgccgtatgctgggggacaacagttggaaacgactgctaataccgcataagcgcacagagaggcatctctcagtgtgaaaaactccggtggcatacgat

SEQ ID NO: 3329 - DNA, 225 bp, Unknown
  bacterial strain Ascusb_2694 encodes 16S rRNA
agagtttgatcatggctcaggatgaacgctggcggcgtgcctaacacatgcaagtcgaacgggactatttgaaagatcttttcggagtgatttcttttagtttagtggcggacgggtgagtaacgcgtggacaacctgcctttcacagggggatagcagctggaaacggctggtaataccgcatacgctcttaagaccgcatgatcttaagaggaaagatttatc

SEQ ID NO: 3330 - DNA, 225 bp, Unknown
  bacterial strain Ascusb_6214 encodes 16S rRNA
agagtttgatcctggctcaggacgaacgctggcggcgtgcctaacacatgcaagtcgagcggggaccagggaagagcttgctcagaactggtttcagcggcggacgggtgagtaacgcgtgagcaacctgccttcagcagggggataacgcatcgaaagatgtgctaataccgcatgagaccacaccttcacatggaggaggggtcaaaggagcgattcggctga

SEQ ID NO: 3331 - DNA, 225 bp, Unknown; identical to SEQ ID NO: 2702
  bacterial strain Ascusb_18852 encodes 16S rRNA

SEQ ID NO: 3332 - DNA, 225 bp, Unknown
  bacterial strain Ascusb_1870 encodes 16S rRNA
agagtttgatcatggctcaggacgaacgctggcggcgtgcctaacacatgcaagtcgaacgaagcacttccgatttgagattcgtcaagaatcggatttgacttagtggcggacgggtgagtaatgcgtgagcaacctgcccttcagagggggacaacagttggaaacgactgctaataccgcataatgtatccgggtggcatcatctggataccaaagatttat

SEQ ID NO: 3333 - DNA, 225 bp, Unknown
  bacterial strain Ascusb_844 encodes 16S rRNA
agagtttgatcatggctcaggacgaacgctggcggcacgcttaacacatgcaagtcgaacggtgaagtagagcttgctctacggatcagtggcggacgggtgagtaacacgtgagcaatctgcctttaagaggggaatagcaactggaaacggttggtaataccgcataatatacatttaccgcatgatagatgtatcaaagatttatcgcttaaagatgagctc

SEQ ID NO: 3334 - DNA, 225 bp, Unknown
  bacterial strain Ascusb_2496 encodes 16S rRNA
agagtttgatcatggctcaggatgaacgctggcggcgtgcctaacacatgcaagtcgagcgagaaattgcagattgaaacttcggtcgaaagaagcgatggacagcggcggacgggtgagtaacgcgtaggtaacctaccttaagctgagggatagcctagggaaacctggattaataccacataatgcggaggagtcacatggcttttccgccaaagatttatc

SEQ ID NO: 3335 - DNA, 225 bp, Unknown
  bacterial strain Ascusb_8764 encodes 16S rRNA
agagtttgatcatggctcaggatgaacgctagcggcaggcttaacacatgcaagtcgcggggcagcgcgggtagcaatacctggcggcgaccggcggaagggtgcgtaacgcgtgagcaacatgcccgtatcagggggataaccgatggaaacgtcgcctaataccccataacaacgagggccgcatgacccatgtttgaaagttacggcggatacggattggct

SEQ ID NO: 3336 - DNA, 225 bp, Unknown
  bacterial strain Ascusb_3963 encodes 16S rRNA
agagtttgatcctggctcagaacgaacgctggcggcaggcctaacacatgcaagtcgagcgtgaaaggggcttcggccctgagtaaagcggcgcacgggtgagtaacacgtgaataatctgcccctccgaccgggataacagaccgaaaggactgctaataccggataagcccacaagtcaaccgggcgtgcgggaaaagtacgggatccttcgggaccgtatgc

SEQ ID NO: 3337 - DNA, 225 bp, Unknown
  bacterial strain Ascusb_5561 encodes 16S rRNA
agagtttgatcatggctcaggacgaacgctggcggcgtgcttaacacatgcaagtcgaacgagcctactggagcagcaatggtccggtaagcgagtggcggacgggtgagtaacgcgtgagcaatctgtccatgcgagggggataacatttggaaacagatgctaataccgcataagaccacgaggccgcatggtcatggggtcaaaggagaaatccgcgcatgg

SEQ ID NO: 3338 - DNA, 225 bp, Unknown
  bacterial strain Ascusb_1162 encodes 16S rRNA
agagtttgatcatggctcaggacgaacgctggcggcgtgcctaacacatgcaagtcgaacggacgagaggagcttgctcctcgagttagtggcgaacgggtgagtaacgcgtgagcaacctgcctttcagagggggacaacggttggaaacgaccgctaataccgcatgaagcattttggtcgcatgatcgggatgccaaagatttatcgctgaaagatgggctc

SEQ ID NO: 3339 - DNA, 225 bp, Unknown
  bacterial strain Ascusb_3649 encodes 16S rRNA
agagtttgatcctggctcaggatgaacgctggcggcgtgcttaacacatgcaagtcgaacgaagctccttgaacagaggattcgtctgaagtgaaaggatgacttagtggcggacgggtgagtaacgcgtggggaatctgccccgtaccgggggataacacttagaaataggtgctaataccgcataagcgcacggtgtcgcatgacacagtgtgaaaaactccg

SEQ ID NO: 3340 - DNA, 225 bp, Unknown
  bacterial strain Ascusb_5045 encodes 16S rRNA
agagtttgatcctggctcaggatgaacgctagcgacaggcctaacacatgcaagtcgagcggcagcacctcgggtggcgagcggcgcacgggtgagtaacgcgtatgtaacctgcccatgagtgggggatagcccggtgaaaaccggattaataccgcataataccattattagacatcttagaatggttaaagattcattgctcatggatggacatgcgttgga

SEQ ID NO: 3341 - DNA, 225 bp, Unknown
  bacterial strain Ascusb_11861 encodes 16S rRNA
agagtttgatcatggctcaggatgaacgctggcggcatgcctaagacatgcaagtcgtacgaggtggcccgtagagttctgtgcttgcacaaaacaatatggatccccacctagtggcgaaagggtgagtaacacgtgggttatctacctcagagactgggataactactggaaacggtagctaataccggatgatatatacaatgatacgttattgtatagtaa

SEQ ID NO: 3342 - DNA, 225 bp, Unknown
  bacterial strain Ascusb_838 encodes 16S rRNA
agagtttgatcatggctcaggacgaacgctggcggcacgcttaacacatgcaagtcgaacgaacggagatagcttgctatcaaagttagtggcggacgggtgagtaacacgtgagcaatctgcctttaagtggggaataacgattggaaacggtcggtaataccgcataaaatagctgaaccgcatgatttggctatcaaagatttatcgcttaaagatgagctc

SEQ ID NO: 3343 - DNA, 225 bp, Unknown
  bacterial strain Ascusb_7526 encodes 16S rRNA
agagtttgatcatggctcaggacgaacgctggcggcgtgcttaacacatgcaagtcgaacggggattaatgcggaagcccttcggggtggaaggattaattcgagtggcggacgggtgagtaacgcgtgagcaacctgtcccagacaggggaataacacttggaaacaggtgctaataccgcataagaccacggggtcgcatggctctggggtaaaaggagtaat

SEQ ID NO: 3344 - DNA, 225 bp, Unknown
  bacterial strain Ascusb_2604 encodes 16S rRNA
agagtttgatcatggctcaggacgaacgctggcggcacgcttaacacatgcaagtcgaacggtgaaaagtagcttgctacttggatcagtggcggacgggtgagtaacacgtgagcaatctgcctctaagtggggaataacgactggaaacggtcggtaataccgcataacatagctgagccgcatgactcggttatcaaagatttatcgcttagagatgagctc

SEQ ID NO: 3345 - DNA, 225 bp, Unknown
  bacterial strain Ascusb_8171 encodes 16S rRNA
agagtttgatcatggctcaggacgaacgctggcggcgtgcctaacacatgcaagtcgagcggagacacgggaacggaaggcttcggctggaagatcccatgttttagcggcggacgggtgagtaacgcgtgagcaatctgtccttcacagggggataagataccgaaaggtgttctaataccgcataagaccacattcccgcatgggagaggggtcaaaggagta

SEQ ID NO: 3346 - DNA, 225 bp, Unknown
  bacterial strain Ascusb_1889 encodes 16S rRNA
agagtttgatcatggctcaggatgaacgctagctacaggcttaacacatgcaagtcgaggggcagcatgaagtttgcttgcaaactttgatggcgaccggcgcacgggtgagtaacgcgtatccaaccttccccttagtagggcatagcccggcgaaagtcggattaataccctatgttcttcgtagaggacatctgaaatgaagcaaagacttgtcgctaaggg

SEQ ID NO: 3347 - DNA, 225 bp, Unknown
  bacterial strain Ascusb_7051 encodes 16S rRNA
agagtttgatcatggctcaggatgaacgctagcggcaggcttaacacatgcaagtcgaggggcagcgagggtagcaatacctgtcggcgaccggcggaagggtgcgtaacgcgtgagcaacatgcccgtatcagggggatagtcattggaaacgatgcgtaataccccataacaacgaggatcacatggtccacgtttgaaagattcatcggatacggattggct

SEQ ID NO: 3348 - DNA, 225 bp, Unknown
  bacterial strain Ascusb_966 encodes 16S rRNA
agagtttgatcctggctcaggacgaacgctggcggcacgcctaacacatgcaagtcgaacggtgttgatttgagtttacttgaatcaacatagtggcggacgggtgagtaacacgtgagcaacctgccttttggcgagggatagcttctggaaacggatggtaatacctcataatatagcttgatcgcatggtcgggttatcaaagaatttcgccaaaagatggg

SEQ ID NO: 3349 - DNA, 225 bp, Unknown
  bacterial strain Ascusb_725 encodes 16S rRNA
agagtttgatcctggctcaggatgaacgctagctacaggcttaacacatgcaagtcgaggggcagcatggggtcagcttgctgactccgatggcgaccggcgcacgggtgagtaacgcgtatccaaccttccctatactaggggatagcccggcgaaagtcggattaataccctatgttcttcatagatggcatctgacgtgaagcaaagattcatcggtatagg

SEQ ID NO: 3350 - DNA, 225 bp, Unknown
  bacterial strain Ascusb_1312 encodes 16S rRNA
agagtttgatcatggctcaggatgaacgctggcggcgtgcctaatacatgcaagtcgaacgcacggaccaagcttgcttgggaagtgagtggcgaacgggtgagtaatacataagcaacctgcccacggagaccgggataacttctggaaacgggaactaagaccggataggtatattgaaggcatcttcgatatattaaaggtgagagacactggtggatgggc

SEQ ID NO: 3351 - DNA, 225 bp, Unknown
  bacterial strain Ascusb_3636 encodes 16S rRNA
agagtttgatcctggctcaggatgaacgctggcggcgtgcttaacacatgcaagtcgaacggagacaacccaccgagtgaagccttagcttgctttggccgatctcaccgggttatcttagtggcggacgggtgagtaacgcgtggataacctgcctgtatctgggggataacagttagaaatgactgctaataccgcataagcgcacggcaccgcatggtactg

SEQ ID NO: 3352 - DNA, 225 bp, Unknown
  bacterial strain Ascusb_2851 encodes 16S rRNA
agagtttgatcatggctcaggacgaacgctggcggcgcgcctaacacatgcaagtcgaacggaggtattgagacagaagcttcggcggaagacttaatactttagtggcgaacgggtgagtaacacgtgaggaacctgcctttaagagggggataacacttagaaataggtgctaataccgcataagaccacagagcggcatcgctcaggggtcaaaggaggaat

SEQ ID NO: 3353 - DNA, 225 bp, Unknown
  bacterial strain Ascusb_254 encodes 16S rRNA
agagtttgatcatggctcaggatgaacgctggcggcgtgcttaacacatgcaagtcgaacgaggttattacagttgaagttttcggatggaaaccgttttaaccgagtggcggacgggtgagtaacgcgtggggaacctgccccattccgggggataccagttggaaacgactgttaataccgcataagcgcacagtaccgcatggtacggtgtgaaaaactccg

SEQ ID NO: 3354 - DNA, 225 bp, Unknown
  bacterial strain Ascusb_8436 encodes 16S rRNA
agagtttgatcctggctcaggacgaacgctggcggcgtgcttaacacatgcaagtcgaacggggatatatcgggaagggcttcggtctggaaggatgtattcgagtggcggacgggtgagtaacgcgtgaacaatctgtcccagacagggggataacacttggaaacaggtgctaataccgcataagaccacggggtcgcatggctttgaggtaaaaggaggaat

SEQ ID NO: 3355 - DNA, 225 bp, Unknown
  bacterial strain Ascusb_3501 encodes 16S rRNA
agagtttgatcctggctcaggatgaacgctagctacaggcttaacacatgcaagtcgcggggcagcactgggattgcttgcaatccctggtggcgaccggcgcacgggtgagtaacgcgtatccaacctgccctgcagtggggaacagcccggcgaaagtcggattaatgccccatggcgtcctcggcgggcatctaatgaggactaaaggcttcggccgctgcg

SEQ ID NO: 3356 - DNA, 225 bp, Unknown
  bacterial strain Ascusb_1070 encodes 16S rRNA
agagtttgatcatggctcaggatgaacgctggcggcgtgcctaacacatgcaagtcgagcggagataaagggtgattcttcggatgaatcctttatcttagcggcggatgggtgagtaacacgtgggtaacctgccctgcacagggggataacagctggaaacggctgttaataccgcatatgcacacgctgccgcatggcagggggtggaaagatttatcggtg

SEQ ID NO: 3357 - DNA, 225 bp, Unknown
  bacterial strain Ascusb_1029 encodes 16S rRNA
agagtttgatcctggctcaggatgaacgctagctacaggcttaacacatgcaagtcgaggggcagcatacaggtagcttgctatctgtgatggcgaccggcgcacgggtgagtaacgcgtatccaacctggcccatagtagggaacagcccggcgaaagtcggattaatgccctatgttgtttgaagcgggcatctaattcaaaccaaagatttatcgctatggg

SEQ ID NO: 3358 - DNA, 225 bp, Unknown
  bacterial strain Ascusb_5260 encodes 16S rRNA
agagtttgatcatggctcaggatgaacgctagctacaggcttaacacatgcaagtcgaggggcagcattatcgaagcttgctttgatagatggcgaccggcgcacgggtgagtaacgcgtatccaaccttccccctaccagaggatagcccggcgaaagtcggattaatactctatgttttccttgttgggcatcttatgaggaacaaagactcgtcggtatggg

SEQ ID NO: 3359 - DNA, 225 bp, Unknown
  bacterial strain Ascusb_1855 encodes 16S rRNA
agagtttgatcatggctcaggacgaacgctggcggcgtgcctaacacatgcaagtcgagcggagatatacttgatgagagcttcggcaggattcgggtatattttagcggcggacgggtgagtaacgcgtgagcaatctgtctcagacagggggataacgcagcgaaagttgcactaataccgcatgagaccacagcatcgcatggtgcaggggtcaaaggagca

SEQ ID NO: 3360 - DNA, 225 bp, Unknown
  bacterial strain Ascusb_2407 encodes 16S rRNA
agagtttgatcatggctcaggatgaacgctagcggcaggcttaacacatgcaagtcgaggggcatcgcgggtagcaatacctggcggcgaccggcgaaagggtgcggaacacgtgagcaacttgcccgtgacagggggataagcgctggaaacggcgtctaataccccgtaacacaagaggtggcatcgccttttgttgaaagtcttcggatggtcacggatggg

SEQ ID NO: 3361 - DNA, 225 bp, Unknown
  bacterial strain Ascusb_2738 encodes 16S rRNA
agagtttgatcatggctcaggacgaacgctggcggcatgcctaacacatgcaagtcgaacggagttaaaggagcttgcttctttaacttagtggcggacgggtgagtaacgcgtgagcaacctgcctctgagtgtggaataatgtactgaaaaggacactaataccgcatgacatacacggaccgcatgatctgtgtatcaaagatttatcgctcagagatgggc

SEQ ID NO: 3362 - DNA, 225 bp, Unknown
  bacterial strain Ascusb_1898 encodes 16S rRNA
agagtttgatcctggctcaggatgaacgctggcggcgtgcttaacacatgcaagtcgaacgaggaataattgatgagatcttcggatggatttagttattccgagtggcggacgggtgagtaacgcgtgggtaacctgccccatacagggggacaacagagggaaacttctgctaataccgcataagcgctttttatggcatcgtaagaagcggaaagctccggc

SEQ ID NO: 3363 - DNA, 225 bp, Unknown
  bacterial strain Ascusb_18214 encodes 16S rRNA
agagtttgatcctggctcaggatgaacgctggcggcgtgcctaacacatgcaagtcgaacggagtttattcgctgcagaggtttcggccaaagcttgaataaacttagtggcggacgggtgagtaacgcgtgggcaacctgcctcgtactgggggataacagttggaaacgactgttaataccgcataagcgcacggtatcgcatgatacagtgtgaaaaactcc

SEQ ID NO: 3364 - DNA, 225 bp, Unknown
  bacterial strain Ascusb_150 encodes 16S rRNA
agagtttgatcatggctcaggatgaacgctagctacaggcttaacacatgcaagtcgaggggcagcatgggagttgcttgcaattcctgatggcgaccggcgcacgggtgagtaacgcgtatccaaccttcccctcagtagggcatagcccgtagaaatgcggattaataccctatgcggtccgatgaggacatctgagctggacgaaaggtttaccgctgaggg

SEQ ID NO: 3365 - DNA, 225 bp, Unknown
  bacterial strain Ascusb_1899 encodes 16S rRNA
agagtttgatcctggctcaggatgaacgctggcggcgtgcttaacacatgcaagtcgaacggagcttagaaggaagcttgctttcatttaagcttagtggcggacgggtgagtaacgcgtgagtaacctgcccttgagaggggaataacatcgagaaatcggtgctaataccgcatgatgtcggaagaccgcatgatctaccgaccaaagatttatcgctcaagg

SEQ ID NO: 3366 - DNA, 225 bp, Unknown
  bacterial strain Ascusb_5919 encodes 16S rRNA
agagtttgatcatggctcaggacgaacgctggcggcgtgcttaacacatgcaagtcgaacgaggttgttttaaggaaggtttcggctggaattgaaataaccgagtggcggacgggtgagtaacgcgtgagcaacctgtcttctacagggggataacgctccgaaaggagtgctaataccgcataagaccacgaagctgcatggctttgaggtcaaaggagcaat

SEQ ID NO: 3367 - DNA, 225 bp, Unknown
  bacterial strain Ascusb_19172 encodes 16S rRNA
agagtttgatcatggctcaggatgaacgctagcgacaggcttaacacatgcaagtcgaggggcagcgcggaggtagcaatacttctggcggcgaccggcgcactggtgagtaacacgtatgcgacctgccccggacagggggataaacccgggaaactgggcctaataccccatatgccatgaggatgcatgtcctcttggtgaaagatccgtcggtccgggatg

SEQ ID NO: 3368 - DNA, 225 bp, Unknown
  bacterial strain Ascusb_5914 encodes 16S rRNA
agagtttgatcatggctcaggatgaacgctagcggcaggcttaacacatgcaagtcgaggggtaacagggcgtagcaatacgccgctgacgaccggcgcacgggtgcgtaacgcgtatacaacctacctgtaacagggggataacggagtgaaaactccactaataccccatattgacgtggtctcgcatgggactgtgtcgaaagcttcggtggttacggatgg

SEQ ID NO: 3369 - DNA, 225 bp, Unknown
  bacterial strain Ascusb_7687 encodes 16S rRNA
agagtttgatcctggctcaggatgaacgctagcggcaggcttaacacatgcaagtcgaggggcagcgcggaggtagcaatacttctggcggcgaccggcggaagggtgcgtaacgcgtgagcaacatgcccgtggcagggggataagcgatggaaacgtcgtctaagaccccgtaacaacagagttcgcatggattttgtttgaaagcttcggcggccacggatt

SEQ ID NO: 3370 - DNA, 225 bp, Unknown
  bacterial strain Ascusb_4837 encodes 16S rRNA
agagtttgatcctggctcaggatgaacgctggcggcgtgcctaacacatgcaagtcgaacgaggtcatttgttcttgcgattcgtcaagagaacttctggccgagtggcggatgggtgagtaacgcgtggagaacctgccctcatctgggggataacaactggaaacggttgacaataccgcatagactctggtgctcgcatgagcgtaagagaaaagatttatc

SEQ ID NO: 3371 - DNA, 225 bp, Unknown
  bacterial strain Ascusb_5818 encodes 16S rRNA
agagtttgatcctggctcaggatgaacgctggcggcgtgcctaatacatgcaagtcgagcgagaagctcgctattgaaacttcggtcgatttagcgagtggaaagcggcggacgggtgagtaacgcgtaggcaacctgccctttgcacagggatagccactggaaacggtgattaatacctgataatgcatctccatcgcctgttggagatgccaaagatttatt

SEQ ID NO: 3372 - DNA, 225 bp, Unknown
  bacterial strain Ascusb_6482 encodes 16S rRNA
agagtttgatcctggctcaggatgaacgctagctacaggcttaacacatgcaagtcgaggggcatcatgtcggttgcttgcaaccgatgatggcgaccggcgcacgggtgagtaacgcgtatccaaccttccccttagtagggcatagcccgtagaaatgcggattaacaccctatgttcttcatggatggcatctgacgtgaagcaaagtttacgctaagggat

SEQ ID NO: 3373 - DNA, 225 bp, Unknown
  bacterial strain Ascusb_3692 encodes 16S rRNA
agagtttgatcctggctcaggatgaacgctggcggcgtgcctaacacatgcaagtcgagcgagacgcgacggaacataacttcggttttgggaagtcgctgatagcggcggacgggtgagtaacgcgtgggcaacctgccccttactgggagatagccgagggaaacttcgagtaataccccataacgcatagacgagacatctcgattatgccaaagatttatc

SEQ ID NO: 3374 - DNA, 225 bp, Unknown
  bacterial strain Ascusb_1101 encodes 16S rRNA
agagtttgatcatggctcagaacgaacgctggtggcgtgtcttatacatgcaagtcgagcgaggcagcaatgccgagcggcgaacgggtgagtaacgcgtaagcaatctgccccatatcaggaaatacccgtgccaacgcgcggttaatgtccaggagagtggccctctgcatggagggttgactagagatttatcggtatgggatgagcttgcgtccgattagc

SEQ ID NO: 3375 - DNA, 225 bp, Unknown
  bacterial strain Ascusb_6119 encodes 16S rRNA
agagtttgatcctggctcaggacgaacgctggcggcgtgcctaacacatgcaagtcgaacggaactgtttggaaggaatcttcggatgacggaagaacagtttagtggcggacgggtgagtaacgcgtgagtaacctgcctccgagaggggaataacgttctgaaaagaacgctaataccgcataacacatatttgccgcatgacagatatgtcaaagattttat

SEQ ID NO: 3376 - DNA, 225 bp, Unknown
  bacterial strain Ascusb_1338 encodes 16S rRNA
agagtttgatcatggctcaggatgaacgctggcggcgtgcttaacacatgcaagtcgaacggagccaaggagtgcttgcattcctgaagcttagtggcggacgggtgagtaacgcgtggggaatctgccccgtaccgggggataacacttagaaataggtgctaataccgcataagcgcacggtaccgcatggtacagtgtgaaaaactccggtggtacgggatg

SEQ ID NO: 3377 - DNA, 225 bp, Unknown
  bacterial strain Ascusb_2097 encodes 16S rRNA
agagtttgatcctggctcaggatgaacgctggcggcgcgcctaacacatgcaagtcgaacggttaaagcaccttcgggtgtgtataaagtggcgaacggctgagtaacacgtgggcaacctgcccctcgcaccgggacagcctcgggaaaccgtggttaataccggatacgccccgcagaggacatcccctgcgggggaaagccccgacggcgagggatgggccc

SEQ ID NO: 3378 - DNA, 225 bp, Unknown
  bacterial strain Ascusb_3298 encodes 16S rRNA
agagtttgatcatggctcaggatgaacgctagctacaggcttaacacatgcaagtcgaggggcagcatgacgatagcttgctattgtcgatggcgaccggcgcacgggtgagtaacgcgtatccaaccttccccttagtagggcatagcccggcgaaagtcggattaataccctatgttcttcaatgcgggcatctaagttgaagcaaagattcatcgctaaggg

SEQ ID NO: 3379 - DNA, 225 bp, Unknown
  bacterial strain Ascusb_18453 encodes 16S rRNA
agagtttgatcctggctcaggatgaacgctggcggcatgcctaagacatgcaagtcgaacgaggtggccctttgaaggatgcgtgcttgcacaaatccggaaaaggattttccacctagtggcagacgggtgagtaacacgtgggtgacctacctttaagttggggataacagttggaaacgattgctaataccgaatgtgatataactgtcgtggttatattga

SEQ ID NO: 3380 - DNA, 225 bp, Unknown
  bacterial strain Ascusb_3533 encodes 16S rRNA
agagtttgatcatggctcaggacgaacgctggcggcacgcttaacacatgcaagtcgaacggtgaagatgcttcggtatcggatcagtggcggacgggtgagtaacacgtgagcaatctgcctttaagtggggaataacatttggaaacggatggtaataccgcataatatagacgaaccgcatgatttgtctatcaaagatttatcgcttaaagatgagctcgc

SEQ ID NO: 3381 - DNA, 225 bp, Unknown
  bacterial strain Ascusb_3537 encodes 16S rRNA
agagtttgatcatggctcagaacgaacgctggcggcaggtcttaggcatgcaagtcgaacggatgacagagagcttgctctctgaagtcagtggcgcacgagtgagtaacgcgtgggaaactgcccttcactggggaataacgtttggaaacgaacgctaataccgcatacgcccgcaaggggaaagatttatcggtgatggatgtgcccgcgttggattagcca

SEQ ID NO: 3382 - DNA, 225 bp, Unknown
  bacterial strain Ascusb_2559 encodes 16S rRNA
agagtttgatcatggctcaggatgaacgctagctacaggcttaacacatgcaagtcgaggggcagcatggtcttagcttgctaaggctgatggcgaccggcgcacgggtgagtaacgcgtatccaaccttccccttagtagggcatagcccggcgaaagtcggattaacaccctatgttttccgttgcgggcatctaatatggaacaaagatttatcgctaaggg

SEQ ID NO: 3383 - DNA, 225 bp, Unknown
  bacterial strain Ascusb_2094 encodes 16S rRNA
agagtttgatcctggctcaggatgaacgctggcggcgtgcttaacacatgcaagtcgaacgaagccaaaaggaagcttgctttctttgaagcttagtggcggacgggtgagtaacgcgtgagaaacctgcccttgagtggggaataacaccgagaaatcggtgctaataccgcataatgtcacgataccgcatgatattgtgaccaaaggatttattcgcttaag

SEQ ID NO: 3384 - DNA, 225 bp, Unknown
  bacterial strain Ascusb_11996 encodes 16S rRNA
agagtttgatcctggctcaggataaacgctggcggcgtgcttaacacatgcaagtcgaacggagtattcctcccgagaccgaggaagcttgcttctgaagaatcaattggaatacttagtggcggacgggtgagtaacgcgtgggtaacctgcctcacacagggggataacagttggaaacgactgttaataccgcataagcgcacagtatcgcatggtacggtg

SEQ ID NO: 3385 - DNA, 225 bp, Unknown
  bacterial strain Ascusb_11494 encodes 16S rRNA
agagtttgatcatggctcaggatgaacgctagctacaggcttaacacatgcaagtcgaggggcagcatgatcttagcttgctaagattgatggcgaccggcgcacgggtgagtaacgcgtatccaaccttccctatagtagaggatagcccggcgaaagtcggattaatactctatgttattcaatgcagacatctaagttgaatcaaaggtttaccgctatagg

SEQ ID NO: 3386 - DNA, 225 bp, Unknown
  bacterial strain Ascusb_6257 encodes 16S rRNA
agagtttgatcctggctcaggatgaacgctagctacaggcttaacacatgcaagtcgaggggcagcaggatcttagcttgctaagattgctggcgaccggcgcacgggtgagtaacgcgtatccaaccttccccttagtagggcatagcccgatgaaaatcggattaataccctatgttcttcgtagaagacatctgacatgaagcaaagattaatcgctaaggg

SEQ ID NO: 3387 - DNA, 225 bp, Unknown
  bacterial strain Ascusb_3785 encodes 16S rRNA
agagtttgatcatggctcaggacgaacgctggcggcgtgcttaacacatgcaagtcgagcggggacatgagggaataagcttcggcagaaagaatcatgttctagcggcggacgggtgagtaacgcgtgagcaatctgtcccagacagggggataacacttggaaacaggtgctaataccgcataagaccacgaggcggcatcgtcttggggtaaaaggggagac

SEQ ID NO: 3388 - DNA, 225 bp, Unknown
  bacterial strain Ascusb_2080 encodes 16S rRNA
agagtttgatcatggctcaggagaaacgctggcggcgcacataagacatgcaagtcgaacggaatttagtcgaatgtttacatgagacgaaaatttagtggcggacgggtgagtaacacgtgagcaacctaccttaaggcgggggataacattgagaaatcagtgctaataccgcataaaactgtaagaggacatcctcatacagtcaaaggagtaatccaccat

SEQ ID NO: 3389 - DNA, 225 bp, Unknown
  bacterial strain Ascusb_21116 encodes 16S rRNA
agagtttgatcctggctcaggataaacgctggcggcgcacataagacatgcaagtcgaacgaaagccgttttaaattaaatgattggatgtgaggacttgtccaagttgaaatgaatttagtttaaaacatatgactttagtggcggactggtgagtaacgcgtgagcaacctgcctgttagaggggaataccagtgagaaatcactgctaataccgcatatgct

SEQ ID NO: 3390 - DNA, 225 bp, Unknown
  bacterial strain Ascusb_5201 encodes 16S rRNA
agagtttgatcctggctcaggatgaacgctagcggcaggcttaacacatgcaagtcgaggggcagcgggttgtagcaatacaatgccggcgaccggcgaaagggtgagtaacgcgtgagcaacatgcccgatactggaggatagtcgatggaaacgtcgcgtaatactccgtaacaacagagaccgcatggtttttgtttaatagatttatcggtatcggattgg

SEQ ID NO: 3391 - DNA, 225 bp, Unknown
  bacterial strain Ascusb_1080 encodes 16S rRNA
agagtttgatcatggctcaggacaaacgctggcggcgtgcctaacacatgcaagtcgaacgaagcactgcggaaagagacttcggtcaattgaagctttgacttagtggcggacgggtgagtaatgcatgagcaacctgccctggagagggggacaacagctggaaacggctgctaataccgcatgatgttgcggggaggcatcttcctgcaaccaaagatttat

SEQ ID NO: 3392 - DNA, 225 bp, Unknown
  bacterial strain Ascusb_3703 encodes 16S rRNA
agagtttgatcatggctcaggacgaacgctggcggcacgcctaacacatgcaagtcgaacggtgttaatttggtttactgaattgacatagtggcggacgggtgagtaacacgtgagcaacctgccttcaagtgagggatagcttctggaaacggatggtaataccttataacataatcttatcgcatggtgagattatcaaagatttatcgcttgaagatgggc

SEQ ID NO: 3393 - DNA, 225 bp, Unknown
  bacterial strain Ascusb_2505 encodes 16S rRNA
agagtttgatcatggctcaggacgaacgctggcggcgtgcttaacacatgcaagtcgaacgaggttatgtttcggaaggcttcggctggaagaggcataaccgagtggcggacgggtgagtaacgcgtgagcaacctgtcttctacagggggataacggtccgaaaggattgctaataccgcataagaccacggtaccgcatggtattgaggtcaaaggagagat

SEQ ID NO: 3394 - DNA, 225 bp, Unknown
  bacterial strain Ascusb_301 encodes 16S rRNA
agagtttgatcatggctcaggatgaacgctagctacaggcttaacacatgcaagtcgaggggcagcatgaggtcagcttgctgactttgatggcgaccggcgcacgggtgagtaacgcgtatccaaccttccccatagtagggtatagcccgtagaaatgcggattaatcccctatgtcctccgaagatgccatcagatttggagcaaagatttatcgctatggg

SEQ ID NO: 3395 - DNA, 225 bp, Unknown
  bacterial strain Ascusb_11066 encodes 16S rRNA
agagtttgatcctggctcaggacgaacgctggcggcgtgcttaacacatgcaagtcgtgcgaggatatgattggaaggtcttcggaccggaagatcgtatccgagcggcggacgggtgagtaacgcgtgagcaacctgccttcaacagggggataacgcatcgaaagatgtgctaataccgcgtaagaccacggcatcacatggtgcaggggtcaaaggagcaat

SEQ ID NO: 3396 - DNA, 225 bp, Unknown
  bacterial strain Ascusb_6723 encodes 16S rRNA
agagtttgatcatggctcaggacgaacgctggcggcgtgcttaacacatgcaagtcgagcggagattgattccggaaggttttcggaccggaagggagcaatttgagcggcggacgggtgagtaacgcgtgagcgatctgtcccatacagggggataacacttggaaacaggtgctaataccgcataagaccacggatctgcatggatcaggggtaaaaggagaa

SEQ ID NO: 3397 - DNA, 225 bp, Unknown
  bacterial strain Ascusb_1308 encodes 16S rRNA
agagtttgatcatggctcaggatgaacgctagctacaggcttaacacatgcaagtcgcggggcatcaggagagaagcttgcttttcttgctggcgaccggcgcacgggtgagtaacgcgtatccaaccttccccttagtagggcatagcccggcgaaagtcggattaataccctatgttgtcgtttgaagacatctgaagacgattaaagattcatcgctaaggg

SEQ ID NO: 3398 - DNA, 225 bp, Unknown
  bacterial strain Ascusb_6742 encodes 16S rRNA
agagtttgatcatggctcaggataaacgctggcggcgtgcttaacacatgcaagtcgaacggagtggttctcccgaagcgtgagggtgcttgcacctgaacaattcatttgaatcacttagtggcggacgggtgagtaacgcgtgggaaacctgccctatactgggggatagcagttggaaacgactgataataccgcataagcgcacagtatcgcatggtacag

SEQ ID NO: 3399 - DNA, 225 bp, Unknown
  bacterial strain Ascusb_2121 encodes 16S rRNA
agagtttgatcctggctcaggatgaacgctagcggcaggcttaacacatgcaagtcgaggggtaacagggagtagcaatactctgctgacgaccggcgcacgggtgcgtaacgcgtatgcaacctacctgtaacaggggtataacggagagaaatttccactaattccccatattgttattctttcgcatgttaggataacgaaagcttcggtggttacggatgg

SEQ ID NO: 3400 - DNA, 225 bp, Unknown
  bacterial strain Ascusb_4208 encodes 16S rRNA
agagtttgatcatggctcaggatgaacgctggcggcgtgcctaatacatgcaagtcgagcgaggtagcttgctacctagcggcgaacgggtgagtaacacgtaggtaacctgcctttgagactgggatacccggacgaaagttcggctaataccggataacaacggagatggcatcttctccgcttgaaaggtgcgtttgcaccactcttagatggacctgcggc

SEQ ID NO: 3401 - DNA, 225 bp, Unknown
  bacterial strain Ascusb_3980 encodes 16S rRNA
agagtttgatcatggctcaggatgaacgctggcggcgtgcttaacacatgcaagtcgaacggagtattgacgctgacgagtagagtagcttgctacgaagcaaatcttgttgatacttagtggcggacgggtgagtaacgcgtgggtaacctgccatatacagggggataacacttagaaataggtgctaataccgcataagcgcacggtatcgcatgatacagt

SEQ ID NO: 3402 - DNA, 225 bp, Unknown
  bacterial strain Ascusb_1379 encodes 16S rRNA
agagtttgatcatggctcaggatgaacgctagctacaggcttaacacatgcaagtcgaggggcagcagggcgatagcttgctattgttgctggcgaccggcgcacgggtgagtaacgcgtatccaaccttccccttactagaggatagcccggcgaaagtcggattaatactctatgttctccttagagggcatctgacgaggagcaaagaaatatcggtaaggg

SEQ ID NO: 3403 - DNA, 225 bp, Unknown; identical to SEQ ID NO: 2308
  bacterial strain Ascusb_4900 encodes 16S rRNA

SEQ ID NO: 3404 - DNA, 225 bp, Unknown
  bacterial strain Ascusb_2422 encodes 16S rRNA
agagtttgatcatggctcagaacgaacgctggcggcgcgtcttaagcatgcaagtcgagcggtaagatagagcttgctctatcctagagcggcggactggtgagtaacgcgtgggtgacgtacccttgtgacggggacagctcctagaaataggagataataccggatacgctgtgcattgtcagaggatgtacaggaaaggatcttttgatccgcacgaggagc

SEQ ID NO: 3405 - DNA, 225 bp, Unknown
  bacterial strain Ascusb_1914 encodes 16S rRNA
agagtttgatcctggctcaggacgaacgctggcggcgtgcttaacacatgcaagtcgaacgaggattacgagattgagagcttcggcaggatagatcgtaattcgagtggcggacgggtgagtaacgcgtgagcaatctgtcccagacaggggaataacacttggaaacaggtgctaataccgcataagaccacagtatcgcatggtacagaggtaaaaggagca

SEQ ID NO: 3406 - DNA, 225 bp, Unknown
  bacterial strain Ascusb_5804 encodes 16S rRNA
agagtttgatcatggctcaggatgaacgctggcggcatgcctaagacatgcaagtcgaacgagacgacctcaagaagactgagtgcttgcacgaagttggaaagagatcatcgtctagtggcagacgggtgagtaacacgtgggtaacctacctaaaagctggggataacagttggaaacgactgctaataccgaataagatattcgtattgaaagaagccttta

SEQ ID NO: 3407 - DNA, 225 bp, Unknown
  bacterial strain Ascusb_3349 encodes 16S rRNA
agagtttgatcatggctcaggatgaacgctggcggcgtgcctaatacatgcaagtcgagcgaggtagcttgctacctagcggcgaacgggtgagtaacacgtaggtaacctgcctttgagactgggatacccgagggaaacttcggctaataccggataacaacggggatggcatcatctccgcttgaaaggtgcgtttgcaccactcttagatggacctgcggc

SEQ ID NO: 3408 - DNA, 225 bp, Unknown
  bacterial strain Ascusb_1329 encodes 16S rRNA
agagtttgatcatggctcaggatgaacgctagctacaggcttaacacatgcaagtcgaggggcagcatattggtagcttgctactaatgatggcgaccggcgcacgggtgagtaacgcgtatccaaccttccctatactagaggatagcccggcgaaagtcggattaatactctatgttcttcgtagatgacatctgaaatgaagcaaagatttatcggtatagg

SEQ ID NO: 3409 - DNA, 225 bp, Unknown
  bacterial strain Ascusb_5587 encodes 16S rRNA
agagtttgatcctggctcaggatgaacgctagcgacaggcttaacacatgcaagtcgaggggcagcgcgagggtagcaatacctttggcggcgaccggcgcactggtgagtaacacgtatgcgacctgccccggacagggggataaacccgggaaactgggcctaataccccatatgccctaaggatgcatgtccttcgggtgaaagatccgtcggtccgggatg

SEQ ID NO: 3410 - DNA, 225 bp, Unknown
  bacterial strain Ascusb_394 encodes 16S rRNA
agagtttgatcatggctcaggatgaacgctggcggcgtgcttaacacatgcaagtcgagcgaagctcctttgttgatttcttcggattgaaacaaaggatgactgagcggcggacgggtgagtaacgcgtggagaacctgccccgtaccgggggataacagttagaaatgactgctaataccgcataagcgcacactatcgcatgatagagtgtgaaaaactccg

SEQ ID NO: 3411 - DNA, 225 bp, Unknown
  bacterial strain Ascusb_3246 encodes 16S rRNA
agagtttgatcctggctcaggataaacgctggcggcgtgcttaacacatgcaagtcgaacggagtaattctcccgaagattgaagaagcttgcttctgaaagattcatttgaattacttagtggcggacgggtgagtaacgcgtgggaaacctgccctatactgggggatagcagttggaaacgactgataataccgcataagcgcacagctttgcatgaagcag

SEQ ID NO: 3412 - DNA, 225 bp, Unknown
  bacterial strain Ascusb_4789 encodes 16S rRNA
agagtttgatcatggctcaggacgaacgctggcggcgtgcctaacacatgcaagtcgaacggagatcaggagcttgcttctgatcttagtggcggacgggtgagtaacgcgtgagtaacctgccttgcagagggggatagccattggaaacgatggataataccgcataacgtatgttgatcgcatggttgatataccaaaggagcaatccgctgtaagatggac

SEQ ID NO: 3413 - DNA, 225 bp, Unknown
  bacterial strain Ascusb_3490 encodes 16S rRNA
agagtttgatcatggctcaggacgaacgctggcggcacgcttaacacatgcaagtcgaacggagttaattgagcttgcttaattaacttagtggcggacgggtgagtaacacgtgagcaatctgccttacggtgggggatagcagttggaaacgactgataataccgcataacataacgggaccgcatgattctgttatcaaagattcattgccgtaagatgagc

SEQ ID NO: 3414 - DNA, 225 bp, Unknown
  bacterial strain Ascusb_17165 encodes 16S rRNA
agagtttgatcctggctcaggatgaacgctggcggcatgcctaagacatgcaagtcgtacgaggcgtccttttgaaacagagtgcttgcacaaagtagataaagatttcgcctagtggcgcaagggtgagtaacacgtgggttatctgccttggagactggaataacaattggaaacgattgctaatgccggatgatatataagatgatacgttgtcttatagta

SEQ ID NO: 3415 - DNA, 225 bp, Unknown
  bacterial strain Ascusb_2704 encodes 16S rRNA
agagtttgatcatggctcagaacgaacgctggcggcaggcctgaggcatgcaagtcgaacgagaaagtgtagcaatacacgagtagagtggcgcacgggtgagtaatatatgggaatctgcccagaagtggggaataacagttggaaacgactgctaataccgcatacgccggaaacgggaaagatttatcgcttttggatgagcccatattggattagcttgtt

SEQ ID NO: 3416 - DNA, 225 bp, Unknown
  bacterial strain Ascusb_3678 encodes 16S rRNA
agagtttgatcatggctcaggatgaacgctagctacaggcttaacacatgcaagtcgaggggcagcatggtcttagcttgctaagactgatggcgaccggcgcacgggtgagtaacgcgtatccaaccttccccatagtagggcatagcccggcgaaagtcggattaacaccctatgttctcctttgcaggcatctaacgaggagcaaagattcatcgctatggg

SEQ ID NO: 3417 - DNA, 225 bp, Unknown
  bacterial strain Ascusb_7221 encodes 16S rRNA
agagtttgatcatggctcaggatgaacgctagcggcaggcttaacacatgcaagtcgaggggtaacgcggggtagcaatactctggcgacgaccggcgcacgggtgcgtaacgcgtatgcaacctaccttgtacagggggataacggagtgaaaattccactaatatcccatagtgttggagaatcgcatggttttccaactaaagcttcggtggtacaagatgg

SEQ ID NO: 3418 - DNA, 225 bp, Unknown
  bacterial strain Ascusb_20847 encodes 16S rRNA
agagtttgatcatggctcaggacgaacgctggcggcgtgcttaacacatgcaagtcgaacggggatcatttggatgagagcttcggcaggattccgggtgattctagtggcggacgggtgagtaacgcgtgagcaacctgtcccagacagggggataacacttggaaacaggtgctaataccgcataagaccacagcaccacatggtgcgggggtaaaaggtgca

SEQ ID NO: 3419 - DNA, 225 bp, Unknown
  bacterial strain Ascusb_2557 encodes 16S rRNA
agagtttgatcatggctcaggatgaacgctagcggcaggcttaacacatgcaagtcgaggggcagcgcgaggtagcaatactttggcggcgaccggcggaagggtgcgtaacgcgtgagcaacttgcccgtatctgggacataaccggtggaaacgccgactaatttcccataacaacagggatgacatcttccttgtttgaaagcttcggtggatacggatggg

SEQ ID NO: 3420 - DNA, 225 bp, Unknown
  bacterial strain Ascusb_1671 encodes 16S rRNA
agagtttgatcatggctcaggatgaacgctggcggcgtgcttaacacatgcaagtcgaacggagtttagagaatgaagttttcggatggatttctttaaacttagtggcggacgggtgagtaacgcgtggggaacctgccccataccgggggacaacagttggaaacgactgctaataccgcataagcgcacggtgtggcatcacacagtgtgaaaaactccggt

SEQ ID NO: 3421 - DNA, 225 bp, Unknown
  bacterial strain Ascusb_1738 encodes 16S rRNA
agagtttgatcatggctcaggacgaacgctggcggcatgcctaacacatgcaagtcgaacggagtttaagaagcttgctttttaaacttagtggcggacgggtgagtaacgcgtgagcaacctgcctttcagtggggaataatattctgaaaagagtactaataccgcataatgtacggataacgcatgttaaccgtaccaaagatttatcgctgagagatgggc

SEQ ID NO: 3422 - DNA, 225 bp, Unknown
  bacterial strain Ascusb_3141 encodes 16S rRNA
agagtttgatcctggctcaggatgaacgctggcggcgtgcctaacacatgcaagtcgaacggagatttaacgctgatgaagcttcggcagaatcttgttaaatcttagtggcggacgggtgagtaacgcgtgggcaacctgcctcgtactgggggataacagttggaaacgactgttaataccgcataagcgcacagtgtcgcatgacacggtgtgaaaaactcc

SEQ ID NO: 3423 - DNA, 225 bp, Unknown
  bacterial strain Ascusb_1842 encodes 16S rRNA
agagtttgatcctggctcaggacgaacgctggcggcacgcctaacacatgcaagtcgaacggtgttttgggggcttgctcctaaaacatagtggcggacgggtgagtaacacgtgagcaacctgccttttggcgagggatagcttctggaaacggatggtaatacctcataatatagctttaccgcatggtatagctatcaaagaatttcgccaaaagatgggct

SEQ ID NO: 3424 - DNA, 225 bp, Unknown
  bacterial strain Ascusb_3454 encodes 16S rRNA
agagtttgatcatggctcaggatgaacgctagcggcaggcttaacacatgcaagtcgaggggcagcgggttgtagcaatacaatgccggcgaccggcgaaagggtgagtaacgcgtgagcaacgtgccttcatcagggggatagtcgatggaaacgtcgtgtaataccccgtaacacataggaccgcatggttttatgttgaaagatttattggatggagatcgg

SEQ ID NO: 3425 - DNA, 225 bp, Unknown
  bacterial strain Ascusb_17158 encodes 16S rRNA
agagtttgatcctggctcaggacgaacgctggcggcatgcctaacacatgcaagtcgaacggagttaagagagcttgctcttttaacttagtggcggacgggtgagtaacgcgtgagcaatctgcctttcagtggggaataatgttctgaaaagagcactaataccgcatgatgtacagtgaccgcatgatcattgtaccaaagatttatcgctgagagatgagc

SEQ ID NO: 3426 - DNA, 225 bp, Unknown
  bacterial strain Ascusb_333 encodes 16S rRNA
agagtttgatcctggctcaggatgaacgctggcggcgtgcctaacacatgcaagtcgagcggagataatgggagattcttcggatgatctcactatcttagcggcggatgggtgagtaacacgtgggtaacctgccctgcacagggggataacagctggaaacggctgttaataccgcatatgcacacgctgccgcatggcagagggtggaaagatttatcggtg

SEQ ID NO: 3427 - DNA, 225 bp, Unknown
  bacterial strain Ascusb_2467 encodes 16S rRNA
agagtttgatcatggctcaggatgaacgctggcggcgtgcttaatacatgcaagtcgaacggagttgttttaatcatgatgtagcttgctatggattgattttttcaacttagtggcggacgggtgagtaacgcgtgggtaacctgccctgtacagggggataacggctggaaacggccgctaaaaccgcataacgtcggaataccgcatgatgttccggccaaa

SEQ ID NO: 3428 - DNA, 225 bp, Unknown
  bacterial strain Ascusb_223 encodes 16S rRNA
agagtttgatcatggctcaggatgaacgctagctacaggcttaacacatgcaagtcgaggggcagcgagaggaaagcttgctttccttgtcggcgaccggcgcacgggtgagtaacgcgtatccaaccttccccttagtagggcatagcccggcgaaagtcggattaataccctatgttttccaatgaggacatctgagctggaacaaagatttatcgctaaggg

SEQ ID NO: 3429 - DNA, 225 bp, Unknown
  bacterial strain Ascusb_14452 encodes 16S rRNA
agagtttgatcctggctcaggatgaacgctagctacaggcttaacacatgcaagtcgaggggcagcatgttggttgcttgcaaccaatgatggcgaccggcgcacgggtgcgtaacgcgtatccaatctgccctgtgctcggggatagccttgcgaaagtaagattaacacccgatggtctccctggcccgcatggtccttggagtaaagttacacggcacggga

SEQ ID NO: 3430 - DNA, 225 bp, Unknown
  bacterial strain Ascusb_4925 encodes 16S rRNA
agagtttgatcatggctcaggacgaacgctggcggcgtgcctaacacatgcaagtcgagcggggatatactggatgagagcttcggcaggattccggtatattctagcggcggacgggtgagtaacgcgtgaacaatctgtcccggacagggggataacacttggaaacaggtgctaataccgcataagaccacagggcggcatcgtccaggggtcaaaggagaa

SEQ ID NO: 3431 - DNA, 225 bp, Unknown
  bacterial strain Ascusb_1750 encodes 16S rRNA
agagtttgatcatggctcaggatgaacgctagctacaggcttaacacatgcaagtcgaggggcatcattgggatagcttgctatttcagatggcgaccggcgcacgggtgagtaacgcgtatccaaccttccccttagtagggcatagcccggcgaaagtcggattaataccctatgttgtatattgaggacatctgatttataccaaagatttatcgctaaggg

SEQ ID NO: 3432 - DNA, 225 bp, Unknown
  bacterial strain Ascusb_2884 encodes 16S rRNA
agagtttgatcatggctcaggatgaacgctagctacaggcttaacacatgcaagtcgaggggcagcatggtcttagcttgctaagactgatggcgaccggcgcacgggtgagtaacgcgtatccaacctggccctcagtaggggatagcccggcgaaagtcggattaataccctatgttctccgaagaagacatctgatttggagcaaagattcatcgctgaggg

SEQ ID NO: 3433 - DNA, 225 bp, Unknown
  bacterial strain Ascusb_3661 encodes 16S rRNA
agagtttgatcctggctcaggatgaacgctggcggcgtgcttaacacatgcaagtcgaacgaagcacctggtttgatttcttcggaatgaggaccttgtgacttagtggcggacgggtgagtaacgcgtgggcaatctgccccataccgggggacaacagttggaaacgactgctaataccgcataagcgcacgaggccgcatggccctgtgtgaaaaactccgg

SEQ ID NO: 3434 - DNA, 225 bp, Unknown
  bacterial strain Ascusb_2098 encodes 16S rRNA
agagtttgatcctggctcaggataaacgctggcggcgtgcttaacacatgcaagtcgaacggagtacttctcccgagaccgaggaagcttgcttccaaagaatcatttgaagtacttagtggcggacgggtgagtaacgcgtgggtaacctgcctcacacagggggataacagttggaaacgactgttaataccgcataagcgcacagtatcgcatgatacagtg

SEQ ID NO: 3435 - DNA, 225 bp, Unknown
  bacterial strain Ascusb_1607 encodes 16S rRNA
agagtttgatcatggctcaggacgaacgctggcggcacgcttaacacatgcaagtcgaacggtgaagagtagcttgctactcggatcagtggcggacgggtgagtaacacgtgagcaatctgcctctaagtggggaataacgtttggaaacggacggtaataccgcataacatacacgaaccgcatgatttgtgtatcaaagatttatcgcttagagatgagctc

SEQ ID NO: 3436 - DNA, 225 bp, Unknown
  bacterial strain Ascusb_3352 encodes 16S rRNA
agagtttgatcatggctcaggatgaacgctggcggcgtgcttaacacatgcaagtcgagcgagaaatcgggaaatgaagcttcggtagatttgaacgatggaaagcggcggacgggtgagtaacacgtgggaaacctgccttttgcagagggacagccgagggaaacttcgattaatacctcataacgcatcatcgtcgcatggcggagatgccaaagatttatc

SEQ ID NO: 3437 - DNA, 225 bp, Unknown
  bacterial strain Ascusb_3973 encodes 16S rRNA
agagtttgatcatggctcaggatgaacgctggcggcgtgcctaacacatgcaagtcgaacggggttaagggaaattttcggatggaacttaacttagtggcggacgggtgagtaacgcgtggataacctgcctcgcactgggggatagcagctggaaacggctggtaataccgcataagaccacgatgccgcatggcattggggtaaaagatttatcggtgtgag

SEQ ID NO: 3438 - DNA, 225 bp, Unknown
  bacterial strain Ascusb_1626 encodes 16S rRNA
agagtttgatcatggctcaggatgaacgctagcgacaggcctaacacatgcaagtcgagcggcagcacctcgggtggcgagcggcgcacgggtgagtaacgcgtatgtaacctgcccatgagtgggggatagcccggtgaaaaccggattaataccccatgacaccattttctgacatcattcaatggttaaagattcattgctcatggatggacatgcgttgga

SEQ ID NO: 3439 - DNA, 225 bp, Unknown
  bacterial strain Ascusb_3354 encodes 16S rRNA
agagtttgatcatggctcaggacgaacgctggcggcgtgcttaacacatgcaagtcgaacggaactattatggaaaatcttcggatgggaagttttagtttagtggcgaacgggtgagtaacgcgtgaggaacctgcctttcagagggggacaacagttggaaacgactgctaataccgcataacatgttttcttcgcatgaagggaacatcaaagattttatcg

SEQ ID NO: 3440 - DNA, 225 bp, Unknown
  bacterial strain Ascusb_14905 encodes 16S rRNA
agagtttgatcctggctcaggatgaacgctagctacaggcttaacacatgcaagtcgaggggcagcattgggatagcttgctattccagatggcgaccggcgcacgggtgagtaacgcgtatccaaccttccccatagtagggcatagcccgtagaaatgcggattaataccctatgttttccgaggatgacatctgattcggaacaaaggttcaccgctatggg

SEQ ID NO: 3441 - DNA, 225 bp, Unknown
  bacterial strain Ascusb_6876 encodes 16S rRNA
agagtttgatcatggctcaggatgaacgctagctacaggcttaacacatgcaagtcgaggggcagcatggtcttagcttgctaagaccgatggcgaccggcgcacgggtgagtaacgcgtatccaacctcccccacagtagcggatagcccggcgaaagtcggattaatacgctatgaggtgcagtattggcatcatggccgcacgaaagatttatcgctgtggg

SEQ ID NO: 3442 - DNA, 225 bp, Unknown
  bacterial strain Ascusb_5120 encodes 16S rRNA
agagtttgatcatggctcagaacgaacgctggcggcgcgtcttaagcatgcaagtcgagcggtaagatagtagcttgctactgtcctagagcggcggactggtgagtaacgcgtgggtgacgtaccctgaggacggggatagcctgtggaaacacagggtaataccggataagctcgtatgtgtcagaggcatacgaggaaaggttcttttgaaccgccttagga

SEQ ID NO: 3443 - DNA, 225 bp, Unknown
  bacterial strain Ascusb_21445 encodes 16S rRNA
agagtttgatcatggctcaggataaacgctggcggcgcacataagacatgcaagtcgaacggaagtcgttatatctgaaatggaaatggactgagaacttgttcaaagaaagttgaagtagattttataacaatggctttagtggcggactggtgagtaacgcgtgagcaacctgcctattagaggggaataacagtgagaaatcattgctaataccgcatatgc

SEQ ID NO: 3444 - DNA, 225 bp, Unknown
  bacterial strain Ascusb_3070 encodes 16S rRNA
agagtttgatcatggctcaggacgaacgctggcggcgtgcttaacacatgcaagtcgaacgagattaagttggaagcttgcttttaacttagtcgagtggcggacgggtgagtaacgcgtgaataatctgtcctatacagggggataacgcatcgaaagatgtgctaataccgcgtaggaccacagcatcgcatggtgcaggggtgaaaggagcaatccagtata

SEQ ID NO: 3445 - DNA, 225 bp, Unknown
  bacterial strain Ascusb_2293 encodes 16S rRNA
agagtttgatcctggctcaggacgaacgctggcggcgcgcctaacacatgcaagtcgaacggacgaagggagcttgctccccgagttagtggcggacgggtgagtaacacgtgagcaacctgcctttcagagggggacaacagttggaaacgactgctaataccgcataacgtggcttgggggcatccccgggctaccaaagatttatcgctgaaagatgggctc

SEQ ID NO: 3446 - DNA, 225 bp, Unknown
  bacterial strain Ascusb_4492 encodes 16S rRNA
agagtttgatcatggctcaggattaacgctggcggcatgcctaatacatgcaagtcgaatggtagcaataccatggcgaacgggtgagtaacacgtaggtaacctgtctttaagacgaggataaccgatggaaacgtcggataatactcgataggtaatctgagggcatctttagattattaaagatttatcacttagagaggggcctgcggcgcattagctaga

SEQ ID NO: 3447 - DNA, 225 bp, Unknown
  bacterial strain Ascusb_4062 encodes 16S rRNA
agagtttgatcctggctcaggatgaacgctagctacaggcttaacacatgcaagtcgaggggtaacatgattggagcttgctccgattgatgacgaccggcgcacgggtgagtaacgcgtatccaacctgccccatgctcagggataaccttccgaaagggagcctaatacctgatgttgtgcgacgatggcatcagaattgcacgaaagattcatcggcatggg

SEQ ID NO: 3448 - DNA, 225 bp, Unknown
  bacterial strain Ascusb_858 encodes 16S rRNA
agagtttgatcatggctcaggatgaacgctagctacaggcttaacacatgcaagtcgaggggcagcatgaagtttgcttgcaaactttgatggcgaccggcgcacgggtgagtaacgcgtatccaacctggcccgcagtagggaacagcccggcgaaagtcggattaatgccctatgtcttcctttgcaggcatccaatgaggaagaaagatttatcgctgcggg

SEQ ID NO: 3449 - DNA, 225 bp, Unknown
  bacterial strain Ascusb_7216 encodes 16S rRNA
agagtttgatcctggctcaggataaacgctggcggcgcacataagacatgcaagtcgaacggaagtcgttatactgattttgatatgaacggagaacttgttcaaagggacttgaggaagatttataacaatggctttagtggcggactggtgagtaacgcgtgagcaacctgcctattagaggggaacaacagttagaaatgactgctaataccgcatatgcct

SEQ ID NO: 3450 - DNA, 225 bp, Unknown
  bacterial strain Ascusb_3890 encodes 16S rRNA
agagtttgatcctggctcagaacgaacgctggcggcaggcttaacacatgcaagttgaacgggatttgtatggtgcttgcactagacaatgagagtagcgcactggtgagtaacacgtgggaacatgccttgaagtgggggacaacagttggaaacgactgctaataccgcatacgccctaagggggaaagatttatcgctttaagattggcccgcggaagatta

SEQ ID NO: 3451 - DNA, 225 bp, Unknown
  bacterial strain Ascusb_20940 encodes 16S rRNA
agagtttgatcctggctcagaacgaacgctggcggcgcgtcttaagcatgcaagtcgagcggtaagatggaagcttgcttctatcctagagcggcggactggtgagtaacgcgtgggtgacgtacccttgtgacggggacagctcctagaaataggagataataccggatacgctgagtgttgtcagaggacattcaggaaaggaacttttgttccgcacgagga

SEQ ID NO: 3452 - DNA, 225 bp, Unknown
  bacterial strain Ascusb_2744 encodes 16S rRNA
agagtttgatcatggctcaggatgaacgctagctacaggcttaacacatgcaagtcgaggggcagcatgaagtttgcttgcaaactttgatggcgaccggcgcacgggtgagtaacgcgtatccaaccttccccttagtagggcatagcccggcgaaagtcggattaataccctatgttattcgtagaggacatctgaaatgaatcaaaggtttaccgctaaggg

SEQ ID NO: 3453 - DNA, 225 bp, Unknown
  bacterial strain Ascusb_120 encodes 16S rRNA
agagtttgatcatggctcaggatgaacgctagctacaggcttaacacatgcaagtcgaggggcagcattatcgaagcttgctttgatagatggcgaccggcgcacgggtgagtaacgcgtatccaaccttccccttagtagggcatagcccgtagaaatgcggattaataccctatgttgtattatgaggacatctgaaagataccaaaggtttaccgctaaggg

SEQ ID NO: 3454 - DNA, 225 bp, Unknown
  bacterial strain Ascusb_4982 encodes 16S rRNA
agagtttgatcatggctcaggatgaacgctagctacaggcttaacacatgcaagtcgaggggcatcgcggggaggcttcggccaccctggcggcgaccggcgaatgggtgagtaacacgtatccaacctgccccgtaccgggggatagccctccgaaaggagaattaataccccatgtctcggtccgcgacatcccggtccgaggaaaggttcgccggtacggga

SEQ ID NO: 3455 - DNA, 225 bp, Unknown
  bacterial strain Ascusb_2111 encodes 16S rRNA
agagtttgatcatggctcaggatgaacgctagctacaggcttaacacatgcaagtcgaggggcatcagggatctagcttgctagatctgctggcgaccggcgcacgggtgagtaacgcgtatccaaccttccccatagtagaggatagcccggtgaaaatcggattaatactctatgttgtataacgaggacatctgaattataccaaaggtttaccgctatggg

SEQ ID NO: 3456 - DNA, 225 bp, Unknown
  bacterial strain Ascusb_4043 encodes 16S rRNA
agagtttgatcatggctcaggacgaacgctggcggcacgcttaacacatgcaagtcgaacggagaatatttggtttactaagtattcttagtggcggacgggtgagtaacacgtgagcaacctgcctttgagagagggatagcttctggaaacggatggtaatacctcataacatatttgaagggcatcctttaaatatcaaagatttatcacttaaagatgggc

SEQ ID NO: 3457 - DNA, 225 bp, Unknown
  bacterial strain Ascusb_1187 encodes 16S rRNA
agagtttgatcctggctcaggatgaacgctggcggcgtgcctaacacatgcaagtcgagcggagtcataagcagattcttcggatgatatttatgacttagcggcggatgggtgagtaacacgtgggtaatctgccctgcacagggggataacagctggaaacggctgttaataccgcatatgcacacgttatcgcatgatagagtgtggaaagattcatcggtg

SEQ ID NO: 3458 - DNA, 225 bp, Unknown
  bacterial strain Ascusb_3926 encodes 16S rRNA
agagtttgatcatggctcaggacgaacgctggcggcacgcttaacacatgcaagtcgaacggagtttatcggagcttgctttggtaaacttagtggcggacgggtgagtaacacgtgagcaatctgcctttcagagggggatagcagttggaaacgactgataataccgcataatatagtagaatcgcatgatttaactatcaaagatttatcgctgaaagatga

SEQ ID NO: 3459 - DNA, 225 bp, Unknown
  bacterial strain Ascusb_3006 encodes 16S rRNA
agagtttgatcatggctcaggatgaacgctggcggcgtgcctaatacatgcaagtcgaacgggtgcagcaatgtaccagtggcgaacgggtgagtaacacgttggtgacctgccccaaagatgggaatatcacctggaaacgggtggcaaaaccgaataagcttgaccgagttagagaaagtcaagtaaaagcgaaagctactttgggaggggcctgcggcccat

SEQ ID NO: 3460 - DNA, 225 bp, Unknown
  bacterial strain Ascusb_6224 encodes 16S rRNA
agagtttgatcctggctcaggataaacgctggcggcgcacataagacatgcaagtcgaacggaagtcgttgtaatgaaatcaaaaagaacggagaacttgttcgaaggaaatggagatagacttacaacaatggctttagtggcggactggtgagtaacacgtaagcaacctgcctgttagaggggaacaacagttagaaatgactgctaataccgcatatgcct

SEQ ID NO: 3461 - DNA, 225 bp, Unknown
  bacterial strain Ascusb_12565 encodes 16S rRNA
agagtttgatcctggctcaggataaacgctggcggcgcacataagacatgcaagtcgaacggaagtcgttataattgattttgagtgaaagatttatccggaacgatgatgattttataacaatggctttagtggcggactggtgagtaacgcgtaagcaatctgcctatcagaggggaataacagtgagaaatcattgctaataccgcatatgccatgaacatc

SEQ ID NO: 3462 - DNA, 225 bp, Unknown
  bacterial strain Ascusb_7394 encodes 16S rRNA
agagtttgatcctggctcaggatgaacgctggcggcgtgcttaatacatgcaagtcgaacgaagcacttacgacagatcccctcggggtgaagatgtttgtgacttagtggcggacgggtgagtaacgcgtgggtaacctgcctcatgcagggggataacagttagaaatgactgctaataccgcataagcgcacggattcgcatgtttctgtgtgaaaagattt

SEQ ID NO: 3463 - DNA, 225 bp, Unknown
  bacterial strain Ascusb_2272 encodes 16S rRNA
agagtttgatcatggctcaggatgaacgctagctacaggcttaacacatgcaagtcgcggggcatcacggcagcggtttaccgttgctggtggcgaccggcgcacgggtgagtaacgcgtatccaacctgcccctcagtagggaatagcccggcgaaagtcggattaatgccctatgttattcgttgaggacatctgaagtgaatcaaagacttgtcgctgaggg

SEQ ID NO: 3464 - DNA, 225 bp, Unknown
  bacterial strain Ascusb_2189 encodes 16S rRNA
agagtttgatcctggctcaggatgaacgctggcggcgtgcttaacacatgcaagtcgaacgaagctactttttacgatcccttcggggtgacgagttgtagacttagtggcggacgggtgagtaacgcgtgggtaacctgccgtatgcagggggacaacagttggaaacgactgctaataccgcataagcgcacgataccgcatggtaaagtgtgaaaagattta

SEQ ID NO: 3465 - DNA, 225 bp, Unknown
  bacterial strain Ascusb_3965 encodes 16S rRNA
agagtttgatcctggctcaggataaacgctggcggcgtgcttaacacatgcaagtcgaacggagtattcctcccgaagattgaagaagcttgcttctgattgattcatttggaatacttagtggcggacgggtgagtaacgcgtgggtaacctgcctcacactgggggatagcagttggaaacgactgataataccgcataagcacacagtatcgcatgatacag

SEQ ID NO: 3466 - DNA, 225 bp, Unknown
  bacterial strain Ascusb_2634 encodes 16S rRNA
agagtttgatcctggctcaggatgaacgctagctacaggcttaacacatgcaagtcgaggggcagcattgagatagcttgctatttcagatggcgaccggcgcacgggtgagtaacgcgtatccaaccttccctatagtagagaatagcccggcgaaagtcggattaatgctctatgttgttcaatgcggacatctaagttgaaccaaaggtttaccgctatagg

SEQ ID NO: 3467 - DNA, 225 bp, Unknown
  bacterial strain Ascusb_7867 encodes 16S rRNA
agagtttgatcctggctcaggatgaacgctagcggcaggcttaacacatgcaagtcgaggggcagcgggttgtagcaatacaatgccggcgaccggcgaaagggtgagtaacgcgtgagcaacgtgccttcatcagggggatagtcgatggaaacgtcgtgtaataccccgtaacactgtttatcgcatggcagacagttgaaagatttattggatggagatcgg

SEQ ID NO: 3468 - DNA, 225 bp, Unknown
  bacterial strain Ascusb_211 encodes 16S rRNA
agagtttgatcatggctcaggatgaacgctagctacaggcttaacacatgcaagtcgaggggcagcataacgaaagcttgcttttgttgatggcgaccggcgcacgggtgagtaacgcgtatccaaccttccctatagtagagaatagcccggcgaaagtcgaattaatgctctatgttcttctttgatggcatctgacgagaagcaaaggttcaccgctatagg

SEQ ID NO: 3469 - DNA, 225 bp, Unknown
  bacterial strain Ascusb_5396 encodes 16S rRNA
agagtttgatcatggctcaggacgaacgctggcggcgtgcctaacacatgcaagtcgaacggagctgtttcacgaaggtcttcggattggacgagacagcttagtggcggacgggtgagtaacgcgtgagcaacctgcctttcagagggggacaacggttggaaacgaccgctaataccgcatgaagcaatcggatcgcatgatctggctgtcaaagattatatc

SEQ ID NO: 3470 - DNA, 225 bp, Unknown
  bacterial strain Ascusb_563 encodes 16S rRNA
agagtttgatcatggctcaggacgaacgctggcggcgtgcctaacacatgcaagtcgagcggagttacagagcggaaagcttcggccggaaggtttgtaacttagcggcggacgggtgagtaacgcgtgagcaacctgtcctctacagggggataagacagcgaaagttgttctaataccgcataagaccacaggatcacatggtccaggggtcaaaggagcaat

SEQ ID NO: 3471 - DNA, 225 bp, Unknown
  bacterial strain Ascusb_12705 encodes 16S rRNA
agagtttgatcatggctcaggatgaacgctagcgacaggcctaacacatgcaagtcgaggggcagcgagccgtagcaatacggtgtcggcgaccggcgaatgggtgagtaacgcgtatgcaacctttccgcaaaacggggatagccttccgaaaggaagattaatacctgatggtcttgccggaccgcatggtttggcaagtaaaaatttattgattgcgggtgg

SEQ ID NO: 3472 - DNA, 225 bp, Unknown
  bacterial strain Ascusb_4131 encodes 16S rRNA
agagtttgatcatggctcaggatgaacgctggcggcgtgcttaacacatgcaagtcgaacggacttatattgaaagtttcggccggatatataagttagtggcggacgggtgagtaacgcgtgggtaacctgccttacaccgggggataacagttggaaacgactgctaataccgcataagaccacagtaccgcatggtacaggggtaaaagttccggcgatgta

SEQ ID NO: 3473 - DNA, 225 bp, Unknown
  bacterial strain Ascusb_3615 encodes 16S rRNA
agagtttgatcatggctcaggatgaacgctagcggcaggcttaacacatgcaagtcgaggggtaacggggcgtagcaatacgctgccgacgaccggcgcacgggtgcgtaacgcgtatgcaacctaccttgtacagggggataacggagagaaatttccactaatatcccatggtgttggagaatcgcatgtttctccgactaaagcttcggtggtacaagatgg

SEQ ID NO: 3474 - DNA, 225 bp, Unknown
  bacterial strain Ascusb_714 encodes 16S rRNA
agagtttgatcatggctcaggacgaacgctggcggcgtgcctaacacatgcaagtcgagcggggaccagggaagagcttgctcagaactggttccagcggcggacgggtgagtaacgcgtgagcaacctgccttcagcagggggataacgcatcgaaagatgtgctaataccgcatgagaccacaccttcacatggaggaggggtcaaaggagcaatccggctga

SEQ ID NO: 3475 - DNA, 225 bp, Unknown
  bacterial strain Ascusb_3607 encodes 16S rRNA
agagtttgatcctggctcaggatgaacgctagctacaggcttaacacatgcaagtcgaggggcagcggggtcttagcttgctaagactgccggcgaccggcgcacgggtgagtaacgcgtatccaaccttccccttagtagggcatagcccgtagaaatgcggattaataccctatgttcttcgtcgatggcctctgaagtgaagcaaaggtttaccgctaaggg

SEQ ID NO: 3476 - DNA, 225 bp, Unknown
  bacterial strain Ascusb_4561 encodes 16S rRNA
agagtttgatcctggctcaggatgaacgctggcggcgtgcctaatacatgcaagtcgaacgggtgcagcaatgcattagtggcgaacgggtgagtaacacgttggtgacctgccccaaagatgggaatatcacctggaaacgggtggcaaaaccgaataagcttggctcagtcagagaaggccaagtaaaagcgaaagctactttgggaggggcctgcggcccat

SEQ ID NO: 3477 - DNA, 225 bp, Unknown
  bacterial strain Ascusb_3589 encodes 16S rRNA
agagtttgatcatggctcaggatgaacgctggcggcgtgcctaacacatgcaagtcgaacggaaccggttttaaagatttcttcggaatgatttgttaccggtttagtggcggacgggtgagtaacgcgtgagtaacctgcccttgagagggggataacgccctgaaaagagcgctaataccgcataacattattgagtcgcatggctcggtaatcaaaactccg

SEQ ID NO: 3478 - DNA, 225 bp, Unknown
  bacterial strain Ascusb_552 encodes 16S rRNA
agagtttgatcatggctcaggatgaacgctggcggcgtgcctaacacatgcaagtcgaacggactttacattgaatgagacttcggttgaaggatttgtaaagttagtggcggacgggtgagtaacgcgtggagaacctgccctgtacagggggataacaatcagaaatgattgctaaaaccgcataagcgcacagtaccgcatggtacagtgtgaaaaactccg

SEQ ID NO: 3479 - DNA, 225 bp, Unknown
  bacterial strain Ascusb_1235 encodes 16S rRNA
agagtttgatcatggctcaggatgaacgctggcggcgtgcctaacacattcaagtcgaacgaactgtagaaatacagtgagtggcggacgggtgagtaacgcgtaagcaatctgcctttgtgtgtggaataacaaccggaaacagttgctaataccgcataacgcataggagtcgcatggctcttatgccaaagatttatcgcacgaagatgagcttgcgtccga

SEQ ID NO: 3480 - DNA, 225 bp, Unknown
  bacterial strain Ascusb_5085 encodes 16S rRNA
agagtttgatcctggctcaggatgaacgctggcggcgtgcttaacacatgcaagtcgaacggagcctagcgagtgcttgcacttgcgaaagcttagtggcggacgggtgagtaacgcgtgggtaacctgccctgtactgggggataacagtcggaaacgactgctaataccgcataagcccacatgaccgcatggtcgagggggaaaaactccggtggtacagga

SEQ ID NO: 3481 - DNA, 225 bp, Unknown
  bacterial strain Ascusb_6736 encodes 16S rRNA
agagtttgatcctggctcaggatgaacgctagctacaggcttaacacatgcaagtcgaggggcagcatttgagtagcttgctactcaagatggcgaccggcgcacgggtgagtaacgcgtatccaaccttccccttagtagcggatagcccggcgaaagtcggattaatacgctatgttcttcgtcgaggacatctgaagtgaagtaaagacatagtcgctaagg

SEQ ID NO: 3482 - DNA, 225 bp, Unknown
  bacterial strain Ascusb_6123 encodes 16S rRNA
agagtttgatcatggctcaggatgaacgctagctacaggcttaacacatgcaagtcgaggggcagcatgggattagcttgctaatcctgatggcgaccggcgcacgggtgagtaacgcgtatccaaccttccccctgctcagggatagcccgctgaaaggcggattaatacctgatggcttcactagatggcatctgacggtgaataaagtttacggcaagggat

SEQ ID NO: 3483 - DNA, 225 bp, Unknown
  bacterial strain Ascusb_3320 encodes 16S rRNA
agagtttgatcctggctcaggatgaacgctggcggcatgcctaacacatgcaagtcgaacggagctagaaggaaagcttgcttttattttagcttagtggcggacgggtgagtaacgcgtgagaaacctgccctgaagtggggaataacaccgagaaatcggtgctaataccgcataatgtcggagatccgcatgtttttccgaccaaaggatttattcgcttta

SEQ ID NO: 3484 - DNA, 225 bp, Unknown
  bacterial strain Ascusb_4355 encodes 16S rRNA
agagtttgatcatggctcaggatgaacgctagctacaggcttaacacatgcaagtcgaggggcagcatgagatcagcttgctgatcttgatggcgaccggcgcacgggtgagtaacgcgtatccaaccttccccctgctcagggatagcccgctgaaaggcggattaacacctgatagcttcactagatggcatctgacggtgaataaaggcttacggcaaggga

SEQ ID NO: 3485 - DNA, 225 bp, Unknown
  bacterial strain Ascusb_2300 encodes 16S rRNA
agagtttgatcatggctcaggatgaacgctggcggcgtgcctaacacatgcaagtcgagcgagaagttcatgatgaaatcttcggaagacggattgagcggaaagcggcggacgggtgagtaacgcgtaggtaacctgccctgtacaaagggatagccactggaaacggtgattaataccttatgataccggacagccacatggttgaccggtcaaagatttatc

SEQ ID NO: 3486 - DNA, 225 bp, Unknown
  bacterial strain Ascusb_19458 encodes 16S rRNA
agagtttgatcctggctcaggatgaacgctagctacaggcttaacacatgcaagtcgaggggcagcatgatcgaagcttgctttgattgatggcgaccggcgcacgggtgagtaacgcgtatccaaccttccctatagtagagaatagcccggcgaaagtcggattaatgctctatgttgtatttagaagacatctgaagaataccaaaggtttaccgctatagg

SEQ ID NO: 3487 - DNA, 225 bp, Unknown
  bacterial strain Ascusb_2143 encodes 16S rRNA
agagtttgatcatggctcaggatgaacgctagctacaggcttaacacatgcaagtcgaggggcagcaggacgatagcttgctattgttgctggcgaccggcgcacgggtgagtaacgcgtatccaaccttccccttagtagggcatagcccggcgaaagtcggattaatcccctatgttgtccgacgatggcatcagaattggactaaagatttatcgctaaggg

SEQ ID NO: 3488 - DNA, 225 bp, Unknown
  bacterial strain Ascusb_1287 encodes 16S rRNA
agagtttgatcatggctcagaacgaacgctggtggcgtgtcttatacatgcaagtcgagcggggcagcaatgcccagcggcgaacgggtgagtaacgcgtaagcaatctgccccatatcaggaaatacccgtgccaacgcgcggttaatgtccaggagagtggccttccgcatgggaggttgactagagattcatcggtatgggatgagcttgcgtccgattagc

SEQ ID NO: 3489 - DNA, 225 bp, Unknown
  bacterial strain Ascusb_935 encodes 16S rRNA
agagtttgatcatggctcaggatgaacgctggcggcgtgcttaacacatgcaagtcgaacggagatatgcgctgattgaagcttcggcagatttcttgcatatcttagtggcggacgggtgagtaacgcgtgggtaacctgccttataccgggggataacacttagaaataggtgctaataccgcataagcgcacgacaccgcatggtgatgtgtgaaaaactcc

SEQ ID NO: 3490 - DNA, 225 bp, Unknown
  bacterial strain Ascusb_4042 encodes 16S rRNA
agagtttgatcctggctcaggacgaacgctggcggcgtgcctaacacatgcaagtcgaacggggattttgtttcggcagaatcctagtggcgaacgggtgagtaacgcgtaggcaacctgccccccggattgggacaacaccccgaaaggggtgctaataccggatacgaagtaactatcgcatggtggttacttgaaagatggcctctacatgtaagctatcgc

SEQ ID NO: 3491 - DNA, 225 bp, Unknown
  bacterial strain Ascusb_1962 encodes 16S rRNA
agagtttgatcctggctcaggatgaacgctggcggcgtgcttaacacatgcaagtcgaacgaagcacttaaacagatttcttcggattgaagtttttgtgacttagtggcggacgggtgagtaacgcgtggataacctgcctgtatctgggggataacagttagaaatgactgctaataccgcataagcgcacgagaccgcatggtcatgtgtgaaaaactccgg

SEQ ID NO: 3492 - DNA, 225 bp, Unknown
  bacterial strain Ascusb_1673 encodes 16S rRNA
agagtttgatcatggctcaggacgaacgctggcggcacgcttaacacatgcaagtcgaacggagctattttgagtttacttggagtagcttagtggcggacgggtgagtaacacgtgagcaacctgcctttgagagagggatagcttctggaaacggatggtaatacctcataacatattcttagggcatcctttggatatcaaagatttatcactcaaagatgg

SEQ ID NO: 3493 - DNA, 225 bp, Unknown
  bacterial strain Ascusb_2439 encodes 16S rRNA
agagtttgatcctggctcaggatgaacgctagctacaggcttaacacatgcaagtcgaggggcatcagggtctgtgcttgcacagattgctggcgaccggcgcacgggtgagtaacgcgtatccaaccttccccttagtagaggatagcccggcgaaagtcggattaatactctatgttgttcaatgcggacatctaagttgaaccaaaggtttaccgctaaggg

SEQ ID NO: 3494 - DNA, 225 bp, Unknown
  bacterial strain Ascusb_13587 encodes 16S rRNA
agagtttgatcatggctcaggattaacgctggcggcatgcctaagacatgcaagtcgaacgaagtgccccaatgagaatggaatgaaatctgagagcttgctcaaaggtggaatgaagtaggatttggattctgcacttagtggcgaacgggtgagtaacacgtgggttatctgccttcaagctggggataacagttagaaatgactgctaataccgaatgtgct

SEQ ID NO: 3495 - DNA, 225 bp, Unknown
  bacterial strain Ascusb_887 encodes 16S rRNA
agagtttgatcatggctcaggacgaacgctggcggcacgcttaacacatgcaagtcgaacgagcgaaagagtgcttgcactctctagctagtggcggacgggtgagtaacacgtgagcaatctgcctttcggtgggggataccatttggaaacgaatgttaataccccataacatagaggatccgcatggattttctatcaaaggtttactgccggaagatgagc

SEQ ID NO: 3496 - DNA, 225 bp, Unknown
  bacterial strain Ascusb_10969 encodes 16S rRNA
agagtttgatcatggctcaggatgaacgctggcggcgtgcctaatacatgcaagtcgaacgaggcggaagggagcttgctcctggaaacctagtggcgaacgggtgagtaacacgtaggtaacctgcccttaagcttgggatacccagaggaaactttggctaataccggataacaacagaggaggcatctcctttgcttgaaaggccctttacggggtcactta

SEQ ID NO: 3497 - DNA, 225 bp, Unknown
  bacterial strain Ascusb_6485 encodes 16S rRNA
agagtttgatcctggctcaggatgaacgctggcggcgtgcttaacacatgcaagtcgaacgagggataggatgaagttttcggacgaattcctattccgagtggcggacgggtgagtaacgcgtgggtaacctgccctgtacagggggataacagttggaaacgactgttaataccgcataagaccacagtgccgcatggcacaggggtaaaaactccggtggta

SEQ ID NO: 3498 - DNA, 225 bp, Unknown
  bacterial strain Ascusb_4670 encodes 16S rRNA
agagtttgatcatggctcaggatgaacgctggcggcgtgcttaacacatgcaagtcgaacgaagcatatcagatgaagttttcggatggattcaggtatgactgagtggcggacgggtgagtaacgcgtgggtaacctgcctcacacagggggacaacagttggaaacggctgctaataccgcataagcgcacaggaccgcatggtctggtgtgaaaaactccgg

SEQ ID NO: 3499 - DNA, 225 bp, Unknown
  bacterial strain Ascusb_4803 encodes 16S rRNA
agagtttgatcatggctcagaacgaacgctggcggcgcgtcttaagcatgcaagtcgaatggcaagataagagcttgctcttatcctagaatggcggactggtgagtaacgcgtgggtgacgtacctcttggatggggatagctactggaaacagtagataataccgaataagctgcatggatttagaggccatgcaggaaagcagcttttgctgcaccgagaga

SEQ ID NO: 3500 - DNA, 225 bp, Unknown
  bacterial strain Ascusb_2835 encodes 16S rRNA
agagtttgatcctggctcaggatgaacgctagcggcaggcttaacacatgcaagtcgaggggcagcgtgggtagcaatacctgacggcgaccggcgaaagggtgagtaacgcgtgagcaacatacccgggaacgggggatagtcattggaaacgatgtgtaataccccataacacatgtcatcgcatgttgatatgttgaaagattcattgattccggattggct

SEQ ID NO: 3501 - DNA, 225 bp, Unknown
  bacterial strain Ascusb_3335 encodes 16S rRNA
agagtttgatcatggctcaggacaaacgctggcggcgtgcctaacacatgcaagtcgaacggacccttcggggttagtggcagacgggtgagtaacacgtaggtaatgtaccttctcgctggggatacctacccgaaagggtggttaataccgaatggtctcgcgctgcggcatcgcggtgcgagtaaagtgttttagcgcgagaggatcagcctgcgggccatc

SEQ ID NO: 3502 - DNA, 225 bp, Unknown
  bacterial strain Ascusb_13798 encodes 16S rRNA
agagtttgatcctggctcaggacgaacgctggcggcgtgcctaacacatgcaagtcgaacggaactactttgaaggattccttcgggatgacggatttttagtttagtggcggacgggtgagtaacgcgtgagtaacctgcctttgagagggggataacgttctgaaaagaacgctaataccgcatgacgcagagaaaccgcatggtaattctgtcaaagatttt

SEQ ID NO: 3503 - DNA, 225 bp, Unknown
  bacterial strain Ascusb_865 encodes 16S rRNA
agagtttgatcctggctcaggacgaacgctggcggcacgcctaacacatgcaagtcgaacggacgagaaggagcttgcttcttcaagttagtggcggacgggtgagtaacacgtgagcaacctgcctttgagagggggatagcttctggaaacggatggtaataccccataacatacatttttcgcatggagagtgtatcaaatgaatttcgctcgaagatgggc

SEQ ID NO: 3504 - DNA, 225 bp, Unknown
  bacterial strain Ascusb_640 encodes 16S rRNA
agagtttgatcatggctcaggacgaacgctggcggcatgcctaacacatgcaagtcgaacgaagttaaagagcttgctttttaacttagtggcggacgggtgagtaacgcgtgagcaacctgcctttcagtggggaataatacttcgaaaggagtactaataccgcataacgtatgacggtcgcatgactgacataccaaagatttatcgctgagagatgggctc

SEQ ID NO: 3505 - DNA, 225 bp, Unknown
  bacterial strain Ascusb_375 encodes 16S rRNA
agagtttgatcatggctcaggatgaacgctggcggcgtgcttaacacatgcaagtcgaacggagatgtttacgacagaggcttcggccgattgaatttacatcttagtggcggacgggtgagtaacgcgtgggcaacctgccgtatgcagggggacaacagctggaaacggctgctaataccgcataagcgcacagcaccgcatggtgcagtgtgaaaagattta

SEQ ID NO: 3506 - DNA, 225 bp, Unknown
  bacterial strain Ascusb_5967 encodes 16S rRNA
agagtttgatcatggctcaggatgaacgctggcggcgtgcctaacacatgcaagtcgaacgaagctctttagacggaggtttcggccaaagcctgaagatgactgagtggcggacgggtgagtaacgcgtgggcaacctgccccattatgggggatagcagttggaaacgactggtaataccgcataagcgcacggtaaggcatcttacagtgtgaaaagattta

SEQ ID NO: 3507 - DNA, 225 bp, Unknown
  bacterial strain Ascusb_9116 encodes 16S rRNA
agagtttgatcctggctcaggatgaacgctggcggcgtgcctaacacatgcaagtcgaacggtgatgatttgatattttcggatggattttcatcatagtggcggacgggtgagtaacgcgtggataacctgcctcgtactggggaatagcagctggaaacggctggtaataccgcataagcgcacgatgccgcatggcattgtgtgaaaagatttatcggtacg

SEQ ID NO: 3508 - DNA, 225 bp, Unknown
  bacterial strain Ascusb_18236 encodes 16S rRNA
agagtttgatcctggctcaggatgaacgctagctacaggcttaacacatgcaagtcgaggggcagcatgaacttagcttgctaagtttgatggcgaccggcgcacgggtgagtaacgcgtatccaaccttccccccagtagggcatagcccggcgaaagtcggattaataccctatgttcttcgtagaggacatctgaaatgaagcaaagatttatcgctggggg

SEQ ID NO: 3509 - DNA, 225 bp, Unknown
  bacterial strain Ascusb_1064 encodes 16S rRNA
agagtttgatcatggctcaggataaacgctggcggcgcacataagacatgcaagtcgaacgaacttaactcattcttatagattgagagcggttagtggcggactggtgagtaatgtataagtaacctgcctatcagaggggaacaacagttggaaacgactgctaataccgcatatgccataagaatcacatggttcaagtgggaaaggagcaatccgctgata

SEQ ID NO: 3510 - DNA, 225 bp, Unknown
  bacterial strain Ascusb_4624 encodes 16S rRNA
agagtttgatcctggctcaggatgaacgctagctacaggcttaacacatgcaagtcgaggggtaacattggctgagcttgctcagccagatgacgaccggcgcacgggtgagtaacgcgtatccaacctgcccatgggtcagggataaccttccgaaagggagcctaatacctgatgcagtgagaagaaggcctctgattttcacgaaagacatttgtcgccgat

SEQ ID NO: 3511 - DNA, 225 bp, Unknown
  bacterial strain Ascusb_1068 encodes 16S rRNA
agagtttgatcatggctcaggatgaacgctagcggcaggcttaacacatgcaagtcgaggggcagcgcggggtagcaatactctggcggcgaccggcggaagggtgcgtaacgcgtgagcaacatgcccgtggcagggggataagcgatggaaacgtcgtctaagaccccgtaacaacagagtccgcatggattttgtttgaaagcttcggcggccacggattgg

SEQ ID NO: 3512 - DNA, 225 bp, Unknown
  bacterial strain Ascusb_3379 encodes 16S rRNA
agagtttgatcatggctcaggatgaacgctagcggcaggcttaacacatgcaagtcgaggggcagcgggtgtagcaatacatgccggcgaccggcgaaagggtgagtaacgcgtgagcaacatacccgttggtgggggataggaggtggaaacgccttgtaataccccatatgatattgaatggcatcatttagtattgaaagattgattgccaacggattggtt

SEQ ID NO: 3513 - DNA, 225 bp, Unknown
  bacterial strain Ascusb_1961 encodes 16S rRNA
agagtttgatcatggctcaggacgaacgctggcggcacgcctaacacatgcaagtcgaacggagattacttagcttgctttgtaatcttagtggcggacgggtgagtaacacgtgagcaacctgcctctgagagagggatagcttctggaaacggatggtaatacctcataacatacattgaccgcatgatcgatgtatcaaagatttatcactcagagatgggc

SEQ ID NO: 3514 - DNA, 225 bp, Unknown
  bacterial strain Ascusb_4210 encodes 16S rRNA
agagtttgatcctggctcaggatgaacgctggcggcgtgcttaacacatgcaagtcgaacggagtatctctcccgagactaaggaagcttgcttccgaggaatcatttgagatacttagtggcggacgggtgagtaacgcgtgggtaacctgcctcacacagggggataacagttggaaacgactgttaataccgcataagcgcacggtaccgcatggtacagtg

SEQ ID NO: 3515 - DNA, 225 bp, Unknown
  bacterial strain Ascusb_1317 encodes 16S rRNA
agagtttgatcatggctcaggacgaacgctggcggcgtgcctaacacatgcaagtcgaacggagtctttcaagcttgcttaaaagacttagtggcggacgggtgagtaacgcgtggggaacctgcctttcagagggggataacgttctgaaaagaacgctaataccgcataacgtatcgagaccgcatgattttgataccaaaggagcaatccgctgaaagatgg

SEQ ID NO: 3516 - DNA, 225 bp, Unknown
  bacterial strain Ascusb_538 encodes 16S rRNA
agagtttgatcatggctcaggatgaacgctggcggcgtgcctaacacatgcaagtcgaacggaccttataatgacagagacttcggtcgacgaagttttaaggttagtggcggacgggtgagtaacgcgtggagaacctgccctgtactgggggataacagtgagaaattactgctaataccgcataagcgcacgggaccgcatggtcctgagtgaaaaactccg

SEQ ID NO: 3517 - DNA, 225 bp, Unknown
  bacterial strain Ascusb_5444 encodes 16S rRNA
agagtttgatcctggctcaggacgaacgctggcggcgtgcttaacacatgcaagtcgaacgaggttatgttgaggaaggcttcggctggaatcgatataaccgagtggcggacgggtgagtaacgcgtgagcaacctgtcttacacagggggataacactccgaaaggagcgctaataccgcataggaccacggggtcgcatgattctgaggtgaaaggagcaat

SEQ ID NO: 3518 - DNA, 225 bp, Unknown
  bacterial strain Ascusb_1617 encodes 16S rRNA
agagtttgatcatggctcaggatgaacgctagctacaggcttaacacatgcaagtcgaggggcagcatgaaagttgcttgcaacttttgatggcgaccggcgcacgggtgagtaacgcgtatccaaccttccccatactagaggatagcccggcgaaagtcggattaatactctatgttgtatttagaggacatctgaagaataccaaaggtttaccggtatggg

SEQ ID NO: 3519 - DNA, 225 bp, Unknown
  bacterial strain Ascusb_4074 encodes 16S rRNA
agagtttgatcatggctcaggataaacgctggcggcgcacataagacatgcaagtcgaacggaagccgttataaatgaaacggattgaagatttatcagattgaagtagattttataacaatgactttagtggcggactggtgagtaacgcgtgagcaacctgcctattagaggggaataacagtgagaaatcattgctaataccgcataagcttgtaggaatgc

SEQ ID NO: 3520 - DNA, 225 bp, Unknown
  bacterial strain Ascusb_6786 encodes 16S rRNA
agagtttgatcatggctcaggacgaacgctggcggcgtgcttaacacatgcaagtcgaacgaagcttgatgattgaacccttcggggtgatttctgatatgactgagtggcggacgggtgagtaacgcgtgaggaacctgcctttcagagggggacaacatttggaaacgaatgctaataccgcataacattaccgagtggcatcgcttggtaatcaaagattta

SEQ ID NO: 3521 - DNA, 225 bp, Unknown
  bacterial strain Ascusb_2432 encodes 16S rRNA
agagtttgatcatggctcagaacgaacgctggcggcaggcttaacacatgcaagttgaacgggatttgcttagtgcttgcaccaagcaatgagagtagcgcactggtgagtaacacgtgggaacatgccttttggtgggggacaacaggaggaaacttctgctaataccgcataagccctgagggggaaagaattattgccgaaagattggcccgcggaagatta

SEQ ID NO: 3522 - DNA, 225 bp, Unknown
  bacterial strain Ascusb_4447 encodes 16S rRNA
agagtttgatcatggctcaggatgaacgctagcgacaggcctaacacatgcaagtcgaggggcagcgggggagcaatcctgccggcgaccggcgcacgggtgagtaacgcgtatgtaacctgcccatgagtgggggatagcccagcgaaagctggattaataccgcatgaaaccgtttgaagacatctgataatggttaaagatttattgctcatggatggacat

SEQ ID NO: 3523 - DNA, 225 bp, Unknown
  bacterial strain Ascusb_5750 encodes 16S rRNA
agagtttgatcatggctcaggatgaacgctggcggcatgcctaatacatgcaagtcgaacggatggattagtacttgtactatgaagtcagtggcgaacgggtgagtaacacatgaacaacctacccctttgactgggataacgttttgaaaagaacgctaataccggataggtgatcttaaggcatcttgagatcattaaaggtgggctacaccacattgggat

SEQ ID NO: 3524 - DNA, 225 bp, Unknown
  bacterial strain Ascusb_13972 encodes 16S rRNA
agagtttgatcatggctcaggatgaacgctggcggcgtgcttaacacatgcaagtcgaacgaagcactttacttgatctcttcggagtgattgttctgtgactgagtggcggacgggtgagtaacgcgtgggtaacctgccttgtacaggggaataacagttggaaacgactgctaataccgcataagcgcacaggaccgcatggtctggtgtgaaaaactccgg

SEQ ID NO: 3525 - DNA, 225 bp, Unknown
  bacterial strain Ascusb_5722 encodes 16S rRNA
agagtttgatcatggctcaggacgaacgctggcggcgtgcttaacacatgcaagtcgaacgaggatatggttggaagtccttcgggatggaagatcatattcgagtggcggacgggtgagtaacgcgtgaacaatctgtcccggaatgggggataacacttggaaacaggtgctaataccgcataagaccacactgtcgcatggcagaggggtaaaaggaggaat

SEQ ID NO: 3526 - DNA, 225 bp, Unknown
  bacterial strain Ascusb_1145 encodes 16S rRNA
agagtttgatcctggctcaggatgaacgctggcggcgtgcctaatacatgcaagtcgagcgagaatctattgaacagagattcgtcaaagtgaaatagaggaaagcggcggacgggtgagtaacgcgtaggcaacctgcccttagcagagggatagccattggaaacgatgattaaaacctcataatgctgtagagtcacatgtctttgcagccaaagatttatc

SEQ ID NO: 3527 - DNA, 225 bp, Unknown
  bacterial strain Ascusb_1206 encodes 16S rRNA
agagtttgatcctggctcagaacgaacgctggcggcaggcttaacacatgcaagttgaacgggattcattagtagcttgctattgatgatgagagtggcgcacgggtgagtaatacgtgggaacgtacctagtagttcggaacaactgatggaaacgtcagctaataccggataagccctgagggggaaagatttattgctattagaacggcccgcggcagatta

SEQ ID NO: 3528 - DNA, 225 bp, Unknown
  bacterial strain Ascusb_6353 encodes 16S rRNA
agagtttgatcctggctcaggacgaacgctggcggcgtgcttaacacatgcaagtcgaacgaagcttgatttcggatttcttcggaatgaagaatgatatgacttagtggcggacgggtgagtaacgcgtgagtaacctgcctttcagagtggaataacgtttggaaacgaacgctaataccgcataacatcacgatgtcgcatggcaatgtgatcaaagattta

SEQ ID NO: 3529 - DNA, 225 bp, Unknown
  bacterial strain Ascusb_5105 encodes 16S rRNA
agagtttgatcctggctcaggacgaacgctggcggcgtgcttaacacatgcaagtcgaacggggattaccgagcggaaggcttcggccggaaggttggtaattccagtggcggacgggtgagtaacgcgtgaacaatctgtcccagacaggggaataacacttggaaacaggtgctaataccgcatgagaccacggggtcgcatggcccaggggtaaaaggagca

SEQ ID NO: 3530 - DNA, 225 bp, Unknown
  bacterial strain Ascusb_4368 encodes 16S rRNA
agagtttgatcctggctcagaacgaacgctggcggcgcgtcttaagcatgcaagtcgagcggtaagttggaagcttgcttctaacctagagcggcggactggtgagtaacgcgtgggtgacgtacccttgtgacggggacagctggtagaaatatcagataataccggatacgctgagtgttgtcagaggacactcaggaaaggaacttttgttccgcacgagga

SEQ ID NO: 3531 - DNA, 225 bp, Unknown
  bacterial strain Ascusb_2451 encodes 16S rRNA
agagtttgatcatggctcaggataaacgctggcggcgtgcctaatacatgcaagtcgatcgctggagttctagcttgctagagcgaaggagaggcgaacgggtgagtaatacataagcaacctgcccacgaagactgggataatttctggaaacggggactaataccggataggtggcttgatcgcatgatcgagtcattaaagattcaaagcactggtggatgg

SEQ ID NO: 3532 - DNA, 225 bp, Unknown
  bacterial strain Ascusb_1382 encodes 16S rRNA
agagtttgatcatggctcaggatgaacgctagctacaggcttaacacatgcaagtcgaggggcatcaggaatctagcttgctagatttgctggcgaccggcgcacgggtgagtaacgcgtatccaaccttccccttagtagggcatagcccggcgaaagtcggattaataccctatgttatccgaagaagacatctgaattggattaaagatttatcgctaaggg

SEQ ID NO: 3533 - DNA, 225 bp, Unknown
  bacterial strain Ascusb_9707 encodes 16S rRNA
agagtttgatcatggctcaggatgaacgctggcggcgtgcctaacacatgcaagtcgaacggatttttctcgctgacgagacttcggtcaaatcttgagaaaagttagtggcggacgggtgagtaacgcgtgggcaacctgcctcatactgggggataacagttggaaacgactgttaataccgcataagcgcacagcatcgcatgatgcagtgtgaaaaactcc

SEQ ID NO: 3534 - DNA, 225 bp, Unknown
  bacterial strain Ascusb_549 encodes 16S rRNA
agagtttgatcatggctcaggatgaacgctagctacaggcttaacacatgcaagtcgaggggcagcatgagcttagcttgctaagcttgatggcgaccggcgcacgggtgagtaacgcgtatccaaccttccccttagtagggcatagcccggtgaaaatcggattaataccctatgttcttcacagcggacatctaacgtgaagcaaaggttcaccgctaaggg

SEQ ID NO: 3535 - DNA, 225 bp, Unknown
  bacterial strain Ascusb_932 encodes 16S rRNA
agagtttgatcatggctcaggacgaacgctggcggcacgcctaacacatgcaagtcgaacggagatacattagcttgcttttgtatcttagtggcggacgggtgagtaacacgtgagcaacctgcctctgagagagggatagcttctggaaacggatggtaatacctcataacgtagtagaaccgcatgattttactaccaaagatttatcactcagagatgggc

SEQ ID NO: 3536 - DNA, 225 bp, Unknown
  bacterial strain Ascusb_3452 encodes 16S rRNA
agagtttgatcatggctcaggatgaacgctggcggcgtgcctaacacatgcaagtcgaacggggttataacgctgaggagacttcggtcaaatcttgttgtaacttagtggcggacgggtgagtaacgcgtggataacctgccatacacagggggataacagttagaaatgactgctaataccgcataagcgcccgagggggcatcctctcgagtgaaaagcgaa

SEQ ID NO: 3537 - DNA, 225 bp, Unknown
  bacterial strain Ascusb_9025 encodes 16S rRNA
agagtttgatcatggctcaggatgaatgctggcggcgtgcctaatacatgcaagtcgagcggtaacagggcttcaccgtgttcttgacgcacttggccattgagcaagtagctgatttcgagagcacagtgaagctgctgacgagcggcggacggctgagtaacgcgtgggaacggaccccaaactgagggataactactcgaaagagtggctaataccgcatgt

SEQ ID NO: 3538 - DNA, 225 bp, Unknown
  bacterial strain Ascusb_9385 encodes 16S rRNA
agagtttgatcctggctcaggatgaatgctggcggcgtgcctaatacatgcaagtcgagcggtaacagggggtctcaccgtttccttgacacacctagcgctttatcgtaggtagtgcaaattcgagggaacagtgagaccctgctgacgagcggcggacggctgagtaacgcgtgggaacggaccccaaactgagggataactagtcgaaagattagctaatac

SEQ ID NO: 3539 - DNA, 225 bp, Unknown
  bacterial strain Ascusb_5051 encodes 16S rRNA
agagtttgatcctggctcaggatgaacgctggcggcgtgcttaacacatgcaagtcgaacggggcgcctaggaaggagacttcggtcaacggattaggttgcctagtggcggacgggtgagtaacgcgtgaggaacctgccttggagtggggaataacagttagaaatagctgctaataccgcataatgcatttaggtcgcatggccttgatgccaaagatttat

SEQ ID NO: 3540 - DNA, 225 bp, Unknown
  bacterial strain Ascusb_2879 encodes 16S rRNA
agagtttgatcctggctcaggatgaacgctggcggcgtgcttaacacatgcaagtcgaacggaggacccttgaaggagttttcggacaacggataggaatccttagtggcggacgggtgagtaacgcgtgaggaacctgccttggagaggggaataacacagagaaatttgtgctaataccgcataacgcagtcatatcgcatggtaagactgccaaagatttta

SEQ ID NO: 3541 - DNA, 225 bp, Unknown
  bacterial strain Ascusb_371 encodes 16S rRNA
agagtttgatcatggctcaggacgaacgctggcggcgtgcttaacacatgcaagtcgaacgaggttaattgaaggaagtcttcggatggaatttggttaaccgagtggcggacgggtgagtaacgcgtgaggaacctgtcttctacagggggataacggtccgaaaggattgctaataccgcataagaccacgaggccgcatggtcatgaggtcaaaggagaaat

SEQ ID NO: 3542 - DNA, 225 bp, Unknown
  bacterial strain Ascusb_8946 encodes 16S rRNA
agagtttgatcctggctcaggatgaacgctagctacaggcttaacacatgcaagtcgaggggtaacatgattggagcttgctccgattgatgacgaccggcgcacgggtgagtaacgcgtatccaacctgccccatgctcagggataaccttccgaaagggagcctaatacctgatgttgtgctttgatggcatcagacgagcacgaaagattcatcggcatggg

SEQ ID NO: 3543 - DNA, 225 bp, Unknown
  bacterial strain Ascusb_5821 encodes 16S rRNA
agagtttgatcatggctcaggatgaacgctagcggcaggcttaacacatgcaagtcgaggggcagcggggtgtagcaatacactgccggcgaccggcgcacgggtgcgtaacgcgtatgcaacctacccgtaacaggggtataacggagtgaaaattccactaatcccccatattgtcattctttcgcatgttgggatgacgaaagcattctgtggttacggacg

SEQ ID NO: 3544 - DNA, 225 bp, Unknown
  bacterial strain Ascusb_8962 encodes 16S rRNA
agagtttgatcctggctcaggatgaacgctggcggcatgcctaagacatgcaagtcgaacgagacgaccttaagaaagctgcgtgcttgcacaaagctggaagaagatcatcgtctagtggcagacgggtgagtaacacgtgggtaacctaccttcaagttggggataacagttggaaacgattgctaataccgaataagatattcgtattgaaagaagccttta

SEQ ID NO: 3545 - DNA, 225 bp, Unknown
  bacterial strain Ascusb_9920 encodes 16S rRNA
agagtttgatcatggctcaggataaacgctggcggcgcacataagacatgcaagtcgaacggaagtcgttatactgattttgaaatgaacggagaacttgttcaaagggacttgatgaagatttataacaatggctttagtggcggactggtgagtaacacgtaagcaacctgcctgttagaggggaacaacagttagaaatgactgctaataccgcatatgcca

SEQ ID NO: 3546 - DNA, 225 bp, Unknown
  bacterial strain Ascusb_5421 encodes 16S rRNA
agagtttgatcatggctcaggatgaacgctagctacaggcttaacacatgcaagtcgaggggcatcatggtggtagcttgctaccgctgatggcgaccggcgcacgggtgagtaacacgtatccaacctgccttgagctcagggatagccctctgaaaggaggattaatacctgatgtggttgtcagctgacatcagctttcaattaaagatttatcggctcatg

SEQ ID NO: 3547 - DNA, 225 bp, Unknown
  bacterial strain Ascusb_3821 encodes 16S rRNA
agagtttgatcatggctcaggatgaacgctagcggcaggcttaacacatgcaagtcgaggggcagcaggctgtagcaatacagtgctggcgaccggcgcaagggcgtgtaacgcgtatgcaacctacctcataacagggggataacccgaggaaacccggactaataccccgtatagtcacgatcccgcatggggttgtgacgaaagattcatcggttggagatg

SEQ ID NO: 3548 - DNA, 225 bp, Unknown
  bacterial strain Ascusb_3613 encodes 16S rRNA
agagtttgatcctggctcagaacgaacgctggcggcgcgtcttaagcatgcaagtcggacggcaagagaagtgcttgcacttctcctagagtggcggactggtgagtaacaggtgggtgacatacccttcagatggggatagccggtagaaataccgggtaataccgaatacgctcgtacatctcggaagtgtacgaggaaaggagctacggcttcgctgttgga

SEQ ID NO: 3549 - DNA, 225 bp, Unknown
  bacterial strain Ascusb_4530 encodes 16S rRNA
agagtttgatcatggctcagaacgaacgctggcggcgcgtcttaagcatgcaagtcgagcggtaagattggtgcttgcactaatcctagagcggcggactggtgagtaacgcgtgggtgacgtacctttgtgacggggacagctgatagaaatatcagataataccggatacgctgtatgttgtcagagggcatacaggaaaggatcttttgattcgcacaaaga

SEQ ID NO: 3550 - DNA, 225 bp, Unknown
  bacterial strain Ascusb_2368 encodes 16S rRNA
agagtttgatcatggctcaggacgaacgctggcggcacgcttaacacatgcaagtcgaacggtgaagatagcttgctatcggatcagtggcggacgggtgagtaacacgtgagcaatctgcctttaagtggggaataacatttggaaacgaatgataataccgcataatatacaagagccgcatgacttttgtatcaaagatttatcgcttaaagatgagctcgc

SEQ ID NO: 3551 - DNA, 225 bp, Unknown
  bacterial strain Ascusb_9492 encodes 16S rRNA
agagtttgatcatggctcaggatgaacgctggcggcgtgcttaacacatgcaagtcgagcgaggcagcaatgccgagcggcgaacgggtgagtaacgcgtaagcaatctgccccatatcaggaaatacccgtgccaacgcgcggttaatgtccaggagagtggccctctgcatggagggttgactagagatttatcggtatgggatgagcttgcgtccgattagc

SEQ ID NO: 3552 - DNA, 225 bp, Unknown
  bacterial strain Ascusb_1483 encodes 16S rRNA
agagtttgatcatggctcaggatgaacgctggcggcgtgcctaacacatgcaagtcgaacggaactgcttttgaagactccttcgggacgaatcgttagtagtttagtggcggacgggtgagtaacgcgtgagtaacctgcccttgagagggggataacgttctgaaaaggacgctaataccgcataacattgcgaagtcgcatggctttgcaatcaaaactccg

SEQ ID NO: 3553 - DNA, 225 bp, Unknown
  bacterial strain Ascusb_4705 encodes 16S rRNA
agagtttgatcatggctcaggatgaacgctggcggcgtgcctaacacatgcaagtcgaacgaagcaagagagcttgctctcttgacttagtggcggacgggtgagtaacgcgtgagtaacctgcccttcagagggggacaacagttggaaacgactgctaataccgcataagaccacgctaccgcatggtagaggggtcaaaggagcaatccgctgaaggatgga

SEQ ID NO: 3554 - DNA, 225 bp, Unknown
  bacterial strain Ascusb_8745 encodes 16S rRNA
agagtttgatcatggctcaggacgaacgctggcggcgtgcttaacacatgcaagtcgaacgagaatctgtggatagaggtttcggccaattgaagcagaggaaagtggcggacgggtgagtaacgcgtgaggaacctgcctttcagagggggacaacagttggaaacgactgctaataccgcatgatgcataggggtcgcatggctcttatgccaaagatttatc

SEQ ID NO: 3555 - DNA, 225 bp, Unknown
  bacterial strain Ascusb_2610 encodes 16S rRNA
agagtttgatcctggctcaggacgaacgctggcggcgtgcctaacacatgcaagtcgagcggggacttaccgaatgaaagcttcggccggatttcagcaagttctagcggcggacgggtgagtaacgcgtgagcaatctgtctcagacagggggataacgcagcgaaagttgcactaataccgcatgagaccacagagccacatggcttaggggtcaaaggagca

SEQ ID NO: 3556 - DNA, 225 bp, Unknown
  bacterial strain Ascusb_6194 encodes 16S rRNA
agagtttgatcctggctcaggacgaacgctggcggcgtgcttaacacatgcaagtcgaacgagggtatttagggagcttgcttcctggatagccgagtggcgaacgggtgagtaacgcgtgagcaacctgtctcacacagggggataacgcaccgaaaggtgtgctaataccgcataagaccacagggggacatcctccaggggtcaaaggaggaatccggtgtg

SEQ ID NO: 3557 - DNA, 225 bp, Unknown
  bacterial strain Ascusb_3338 encodes 16S rRNA
agagtttgatcctggctcaggacgaacgctggcggcacgcttaacacatgcaagtcgaacggagatacattgagtttacttagtgtatcttagtggcggacgggtgagtaacacgtgagcaacctgcctttgagagagggatagcttctggaaacggatggtaatacctcataacgtagttggatcgcatgatctgactaccaaagatttatcactcaaagatgg

SEQ ID NO: 3558 - DNA, 225 bp, Unknown
  bacterial strain Ascusb_20271 encodes 16S rRNA
agagtttgatcctggctcaggataaacgctggcggcgcacataagacatgcaagtcgaacggaagtcgttgtaatgatgttgacatgaacggagaacttgttcaaagagagtgaagattgacttacaacaatggctttagtggcggactggtgagtaatgtataagtaacctgcctatcagaggggaacaacagttggaaacgactgctaataccgcatatgcca

SEQ ID NO: 3559 - DNA, 225 bp, Unknown
  bacterial strain Ascusb_1575 encodes 16S rRNA
agagtttgatcatggctcaggatgaacgctagctacaggcttaacacatgcaagtcgaggggtaacgacagcgaaagcttgcttttgctgggcgacgaccggcgaatgggtgagtaacgcgtatccaacctgccgcaaagtagggcacagccttgcgaaagtaagattaatgccctatgtgctgtgatgaggacatctgaattgcagtaaaggttcaccgctttg

SEQ ID NO: 3560 - DNA, 225 bp, Unknown
  bacterial strain Ascusb_358 encodes 16S rRNA
agagtttgatcctggctcaggatgaacgctggcggcgtgcctaacacatgcaagtcgagcggagatgttgagagatccttcgggtgatttcttcatcttagcggcggatgggtgagtaacacgtgggtaacctgccctgcacagggggataacagctggaaacggctgttaataccgcatatgcacacgctgccgcatggcagggggtggaaagatttatcggtg

SEQ ID NO: 3561 - DNA, 225 bp, Unknown
  bacterial strain Ascusb_5489 encodes 16S rRNA
agagtttgatcctggctcagaacgaacgctggcggcgcgtcttaagcatgcaagtcgagcgtgattgaatagcttgctattcatgaaagcggcggactggtgagtaacgcgtgggtgacgtaccctttggatggggatagctcctagaaataggagataataccgaataagctgcatgttgtcagaggacatgcaggaaaggaacatatgttccgccgaaggagc

SEQ ID NO: 3562 - DNA, 225 bp, Unknown
  bacterial strain Ascusb_250 encodes 16S rRNA
agagtttgatcatggctcaggatgaacgctagctacaggcttaacacatgcaagtcgaggggcagcgggaagttagcttgctaactttgccggcgaccggcgcacgggtgagtaacgcgtatccaaccttccccttagtagggcatagcccgtagaaatgcggattaataccctatgttattcgtcgaggacatctgaagtgaatcaaaggtttaccgctaaggg

SEQ ID NO: 3563 - DNA, 225 bp, Unknown
  bacterial strain Ascusb_2302 encodes 16S rRNA
agagtttgatcctggctcaggatgaacgctggcggcgtgtttaacacatgcaagtcgagcgagaagctttccagtagattcttcggatgatacaggattgcggaaagcggcggacgggtgagtaacgcgtaggcaacctgccccctgcagagggatagcctcgggaaaccgggattaaaacctcataatgcggcaccgagacatctcggagccgccaaagattta

SEQ ID NO: 3564 - DNA, 225 bp, Unknown
  bacterial strain Ascusb_3250 encodes 16S rRNA
agagtttgatcatggctcagaacgaacgctggtggcgtgtcttatacatgcaagtcgagcgaggcagcaatgccgagcggcgaacgggtgagtaacgcgtaagcaatctgccccatatcaggaaatacccgtgccaacgcgcggttaatgtccaggagagtggctagctgcatggctggttgactagagatttatcggtatgggatgagcttgcgtccgattagc

SEQ ID NO: 3565 - DNA, 225 bp, Unknown
  bacterial strain Ascusb_5736 encodes 16S rRNA
agagtttgatcctggctcaggacgaacgctggcggcgtgcttaacacatgcaagtcgaacggggatcatttggatgagagcttcggcaggattccgggtgattctagtggcggacgggtgagtaacgcgtgagcaatctgtcccagacagggggataacacttggaaacaggtgctaataccgcataagaccacggggccacatggtccaggggtaaaaggagaa

SEQ ID NO: 3566 - DNA, 225 bp, Unknown
  bacterial strain Ascusb_1963 encodes 16S rRNA
agagtttgatcctggctcaggatgaacgctagctacaggcttaacacatgcaagtcgaggggcagcaggacgatagcttgctattgtcgctggcgaccggcgcacgggtgagtaacgcgtatccaaccttccccgtagtaggggatagcccggcgaaagtcggattaataccctatgttcttcaatgcggacatctaagttgaagcaaaggttcaccgctatggg

SEQ ID NO: 3567 - DNA, 225 bp, Unknown
  bacterial strain Ascusb_1888 encodes 16S rRNA
agagtttgatcatggctcaggatgaacgctggcggcgtgcctaacacatgcaagtcgaacgaggttacttaagttggagattcgtcaaagacttttttaaccgagtggcggatgggtgagtaacgcgtggagaacctgcccttatcagggggataacaactggaaacggttgacaataccgcatacgctccaatagccgcatggcctttggaggaaagatttatc

SEQ ID NO: 3568 - DNA, 225 bp, Unknown
  bacterial strain Ascusb_1871 encodes 16S rRNA
agagtttgatcatggctcaggatgaacgctggcggcacgcctaacacatgcaagtcgaacggagtttaagagagcttgcttttttaaacttagtggcggacgggtgagtaacacgtgagcaacctgcctttcagagagggatagcttctggaaacggatggtaatacctcataacatacgttgatggcatcattaatgtatcaaagatttatcgctgaaagatgg

SEQ ID NO: 3569 - DNA, 225 bp, Unknown
  bacterial strain Ascusb_3276 encodes 16S rRNA
agagtttgatcatggctcaggatgaacgctagctacaggcttaacacatgcaagtcgaggggcagcgggaagatagcttgctatctttgccggcgaccggcgcacgggtgagtaacacgtatccaacctgccgtcagcttggggatagccctctgaaaggaggattaatacccgatgtggttgtgttcctgcatggggatgcaattaaagattcatcggctgtcg

SEQ ID NO: 3570 - DNA, 225 bp, Unknown
  bacterial strain Ascusb_1628 encodes 16S rRNA
agagtttgatcatggctcaggacgaacgctggcggcgtgcctaacacatgcaagtcgaacggagttaccaagaatttcggtttgaagtaacttagtggcggacgggtgagtaacgcgtgagtaacctgcctagaagagggggataacgttctgaaaagaacgctaataccgcataacgtataagtttcgcatggaatttataccaaaggagtaatccgcttttag

SEQ ID NO: 3571 - DNA, 225 bp, Unknown
  bacterial strain Ascusb_18804 encodes 16S rRNA
agagtttgatcctggctcaggatgaacgctagctacaggcttaacacatgcaagtcgaggggcagcgtgtacaggtgcttgcaccagtatgacggcgaccggcgcacgggtgagtaacgcgtatccaacctgccatatactcgggtatagcccggtgaaaaccgaattaacccccgatagtgtcctttgcaggcatctaattaggactaaagtttacggtatatg

SEQ ID NO: 3572 - DNA, 225 bp, Unknown
  bacterial strain Ascusb_9789 encodes 16S rRNA
agagtttgatcctggctcaggacgaacgctggcggcgtgcttaacacatgcaagtcgaacgaggttgattgagaagcttgctttttgagataccgagtggcaaacgggtgagtaacgcgtagacaacctgccgtgaagatggggacaacagatcgaaaggtctgctaataccgaatgttgtagatcctccgcatgaaggattcactaaaggtgccctctgtatat

SEQ ID NO: 3573 - DNA, 225 bp, Unknown
  bacterial strain Ascusb_822 encodes 16S rRNA
agagtttgatcatggctcaggatgaacgctggcggcgtgcttaacacatgcaagtcgaacgagctgcgcggactgaagttttcggatggatggctgcgtacgcgagtggcggacgggtgagtaacgcgtggggaacctgccccattccgggggataccagttggaaacgactgttaataccgcataagcgcacggtaccgcatggtacagtgtgaaaaactccgg

SEQ ID NO: 3574 - DNA, 225 bp, Unknown
  bacterial strain Ascusb_11560 encodes 16S rRNA
agagtttgatcatggctcaggacgaacgctggcggcacgcctaacacatgcaagtcgaacggtgaatttggtgcttgcactgaattcatagtggcggacgggtgagtaacacgtgagcaacctgccttcaagtgagggatagcttctggaaacggatggtaataccttataaaatatatttgtcgcatggcatatatatcaaagatttattgcttgaagatgggc

SEQ ID NO: 3575 - DNA, 225 bp, Unknown
  bacterial strain Ascusb_14579 encodes 16S rRNA
agagtttgatcatggctcaggatgaacgctggcggcgtgcttaatacatgcaagtcgaacgaagatttttcgccgaagtttacttcattgaaaaatcttagtggcggacgggtgagtaacgcgcgggtaacctgccttacacagggggataacagttagaaatgactgctaataccgcataagcgcacagtatcgcatgatacagtgtgaaaaactccggtggtg

SEQ ID NO: 3576 - DNA, 225 bp, Unknown
  bacterial strain Ascusb_2256 encodes 16S rRNA
agagtttgatcatggctcaggacgaacgctggcggcatgcctaacacatgcaagtcgaacggagcttgaggagcttgcttttcaagcttagtggcggacgggtgagtaacgcgtgagcaacctgcctctgagtgtggaataatgtactgaaaaggacactaataccgcatgaaatgtagctgtcgcatgacagtaacatcaaagatttatcgctcagagatgggc

SEQ ID NO: 3577 - DNA, 225 bp, Unknown
  bacterial strain Ascusb_17990 encodes 16S rRNA
agagtttgatcatggctcagaacgaacgctggcggcgcgtcttaagcatgcaagtcgagcggtaagatgccttcgggtatcctagagcggcggactggtgagtaacacgtagatgacgcacccttctgacggggatagcctgtggaaacacagggtaataccggataagcccgtggggattggaagcttacggggaaaggaactattgttccgcgggaggagcgg

SEQ ID NO: 3578 - DNA, 225 bp, Unknown
  bacterial strain Ascusb_1705 encodes 16S rRNA
agagtttgatcatggctcaggatgaacgctggcggcgtgcctaacacatgcaagtcgagcggagatatatgtctaagagacttcggtcaaattaattatatcttagcggcggatgggtgaggaacgcgtggagaacctgcccttcacagggggataacagctggaaacggctgttaataccgcatatgctcacagcaccgcatggtgcagggaggaaagccgaga

SEQ ID NO: 3579 - DNA, 225 bp, Unknown
  bacterial strain Ascusb_628 encodes 16S rRNA
agagtttgatcctggctcaggacgaacgctggcggcgtgcttcatacatgcaagtcgaacgataaggccccttcgggggtacataagtggcggacgggtgagtaatatgtagagaatctgccttcaagcgggggacaacagagggaaacttctgctaataccccatatgagcgtacctgcgatggtattcttgaaagctccggcgcttggagatgagtctgcatc

SEQ ID NO: 3580 - DNA, 225 bp, Unknown
  bacterial strain Ascusb_1717 encodes 16S rRNA
agagtttgatcatggctcagaacgaacgctggcggcgcgtcttaagcatgcaagtcgaacggcaagattggtgcttgcaccgatcctagagtggcggactggtgagtaacacgtgggtgacgtaccctctgaatggggatagccggtagaaataccggataataccgaataaccttgcacctttagagtggtgtaagaaaaggagcttcggcttcgtcggaggaa

SEQ ID NO: 3581 - DNA, 225 bp, Unknown
  bacterial strain Ascusb_2120 encodes 16S rRNA
agagtttgatcatggctcaggatgaacgctggcggcgtgcctaacacatgcaagtcgaacggagttatgacgccgaggagacttcggtcaaatcatgttgtaacttagtggcggacgggtgagtaacgcgtggataacctgccatatacagggggataacagttagaaatgactgctaataccgcataagcgcacggaaacgcatgtttcagtgtgaaaaactcc

SEQ ID NO: 3582 - DNA, 225 bp, Unknown
  bacterial strain Ascusb_9216 encodes 16S rRNA
agagtttgatcatggctcaggatgaacgctagctacaggcttaacacatgcaagtcgaggggcagcatgagattagcttgctaatcttgatggcgaccggcgcacgggtgagtaacgcgtatccaaccttccccctgctcagggatagcccggtgaaaaccggattaagacctgatagtttcactagatggcatctgacggtgaataaaggtttcggcatgggat

SEQ ID NO: 3583 - DNA, 225 bp, Unknown
  bacterial strain Ascusb_11323 encodes 16S rRNA
agagtttgatcctggctcaggatgaacgctagctacaggcttaacacatgcaagtcgaggggcagcagggcaatagcttgctattgttgctggcgaccggcgcacgggtgagtaacgcgtatccaacctggcccacagtagggaacagcccggcgaaagtcggattaatgccctatgttttcctttgagagcatttgaggaggaacaaagattcatcgctatggg

SEQ ID NO: 3584 - DNA, 225 bp, Unknown
  bacterial strain Ascusb_1618 encodes 16S rRNA
agagtttgatcctggctcaggataaacgctggcggcgtgcttaacacatgcaagtcgaacgagactgcctggaaaattacttcggtatgcttctgggatttgtcgagtggcggacgggtgagtaacgcgtgagtaacctgccttggagtgggggataacagttagaaatgactgctaataccgcataagcgcacgaaatcgcatgattttgtgtgaaaaactccg

SEQ ID NO: 3585 - DNA, 225 bp, Unknown
  bacterial strain Ascusb_13474 encodes 16S rRNA
agagtttgatcatggctcaggacgaacgctggcggcgtgcttaacacatgcaagtcgaacggggattagttggttgagagcttcggcaggataccggttaattcgagtggcggacgggtgagtaacgcgtgagcaacctgtcccagacagggggataacacttggaaacaggtgctaataccgcataagaccacagtaggacatcctagaggggtaaaaggagca

SEQ ID NO: 3586 - DNA, 225 bp, Unknown
  bacterial strain Ascusb_10458 encodes 16S rRNA
agagtttgatcatggctcaggatgaacgctggcggcatgcctaagacatgcaagtcgaacgagacgaccttaagaagactgagtgcttgcacgaagttggaagaagatcatcgtctagtggcagacgggtgagtaacacgtgggtaacctacctttaagttggggataacagttggaaacgacagctaataccgaatgagatattcgtattgaaagaagccttta

SEQ ID NO: 3587 - DNA, 225 bp, Unknown
  bacterial strain Ascusb_6383 encodes 16S rRNA
agagtttgatcctggctcaggatgaacgctggcggcgcgcttaacacatgcaagtcgaacggttaaagccccttcgggggtgcataaagtggcgaacggctgagtaacacgtgggcaacctgccccccgcaccgggatagcctcgggaaaccgtgggtaataccggatactccctccctgccgcatggctgggaggggaaatgcgtacacggcgggggatgggcc

SEQ ID NO: 3588 - DNA, 225 bp, Unknown
  bacterial strain Ascusb_3013 encodes 16S rRNA
agagtttgatcatggctcaggatgaacgctagctacaggcttaacacatgcaagtcgcggggcagcatggagtcagcttgctgactttgatggcgaccggcgcacgggtgagtaacgcgtatccaacctgcctgtatctccggcatagcccgccgaaaggcgaattaattccggatgatatcttttgacggcatcggattaggattaaaggagcaatccggatac

SEQ ID NO: 3589 - DNA, 225 bp, Unknown
  bacterial strain Ascusb_3938 encodes 16S rRNA
agagtttgatcatggctcaggatgaacgctggcggcgtgcataacacattcaagtcgaacgaagcgcagagacggaagtccttcggggcggaagattctgtgacttagtggcggacgggtgagtaacgcgtgagcaacctgcctgtgatagagggataacacatggaaacgtgtgctaataccacatgaggcgcagatatcgcatggtgactgcgttaaagaatt

SEQ ID NO: 3590 - DNA, 225 bp, Unknown
  bacterial strain Ascusb_16139 encodes 16S rRNA
agagtttgatcatggctcaggatgaacgctggcggcatgcctaagacatgcaagtcgaacgaagtggcccaatgaagagaacgagcttgctcaatcttggatttggattcccacttagtggcgcaagggtgagtaacacgtgggtaatctgccttcgagtctggaataacagttagaaatgattgctaatgccggataatatggagaacgatacgtcattcttta

SEQ ID NO: 3591 - DNA, 225 bp, Unknown
  bacterial strain Ascusb_6000 encodes 16S rRNA
agagtttgatcctggctcaggatgaacgctagcggcaggcttaacacatgcaagtcgaggggcagcgggttgtagcaatacaatgccggcgaccggcggaagggtgcgtaacgcgtgaacaatctgcccgtatccggggcataagcgatggaaacgtcgtctaatatcccataacaacgagggccgcatgacccatgtttgaaagattcgtcggatacggatgag

SEQ ID NO: 3592 - DNA, 225 bp, Unknown
  bacterial strain Ascusb_9175 encodes 16S rRNA
agagtttgatcctggctcagaacgaacgctggcagcgtggattaggcatgcaagtcgaacgggatcggggaggcagcaatgtcgccccgtgagagtggcggaagggcgaggaacacgtgggcaacctgtctctgaggtggggaaaaccgctggaaacggcggctaataccgaatgtagcgcccgctcgcatgagcggagcgccaaagggggcgaaagctccccct

SEQ ID NO: 3593 - DNA, 225 bp, Unknown
  bacterial strain Ascusb_4413 encodes 16S rRNA
agagtttgatcatggctcaggatgaacgctagctacaggcttaacacatgcaagtcgaggggcatcgcgggagttgcttgcaacttctggcggcgaccggcgcacgggtgagtaacgcgtatccaacctgccctttactacggtatagcccagcgaaagttggattaatcccgtatgttgtcgcgcgatggcatctgatcgcgacgaaaggttcaccggtagagg

SEQ ID NO: 3594 - DNA, 225 bp, Unknown
  bacterial strain Ascusb_916 encodes 16S rRNA
agagtttgatcctggctcaggatgaacgctggcggcgtgcttaacacatgcaagtcgagcgaagcactggtttgaatttcttcggattgacgaacctttgactgagcggcggacgggtgagtaacgcgtggggaacctgccccataccgggggataacagacggaaacgtctgctaataccgcataagcgcacgaagcggcatcgttttgtgtgaaaaactccgg

SEQ ID NO: 3595 - DNA, 225 bp, Unknown
  bacterial strain Ascusb_9659 encodes 16S rRNA
agagtttgatcatggctcaggatgaacgctggtggcgtgtcttatacatgcaagtcgagcgaggcagcaatgccgagcggcgaacgggtgagtaacgcgtaagcaatctgccccatatcaggaaatacccgtgccaacgcgcggttaatgtccaggagagtggccttctgcatggaaggttgactagagatttatcggtatgggatgagcttgcgtccgattagc

SEQ ID NO: 3596 - DNA, 225 bp, Unknown
  bacterial strain Ascusb_1234 encodes 16S rRNA
agagtttgatcctggctcaggatgaacgctggcggcgtgcctaacacatgcaagtcgagcggagtacagaatgaagcttgctttgatctgtacttagcggcggatgggtgaggaacgcgtgggcaacctgcccttcacagggggataacagatggaaacgcctgttaataccgcatatgctcacagcaccgcatggtgcagggaggaaagccgagacggtgaagg

SEQ ID NO: 3597 - DNA, 225 bp, Unknown
  bacterial strain Ascusb_3758 encodes 16S rRNA
agagtttgatcatggctcaggatgaacgctagcgacaggcctaacacatgcaagtcgaggggcagcgcggggaaagcttgcttttcctggcggcgaccggcgcacgggtgcgtaacaggtgtgcaatctgtccatagtcgggggatagcccggcgaaagccgaattaatactccatgtgtcacgaaggggcatccctttgtgatgaaacgtaaggactatgggtg

SEQ ID NO: 3598 - DNA, 225 bp, Unknown
  bacterial strain Ascusb_971 encodes 16S rRNA
agagtttgatcatggctcaggatgaacgctggcggcgtgcttaacacatgcaagttgaacgaaggtacgggatgaggcttcggcggaatcttgtatacttagtagcggacgggtgagtaacgcgtgggcaacctgccctgtacagggggacaacagctggaaacggctgctaataccgcataagcgcacagcaccgcatggtgccgtgtgaaaagcgcaacggta

SEQ ID NO: 3599 - DNA, 225 bp, Unknown
  bacterial strain Ascusb_355 encodes 16S rRNA
agagtttgatcatggctcaggatgaacgctggcggcgtgcctaacacatgcaagtcgagcgggaatctgttgattgagacttcggtggattgatgcagaggatagcggcggacgggtgagtaacgcgtaggtaacctgccccttacacagggatagcctcgggaaactgggattaatacctgataatgcgatggagtcacatggctttatcgccaaagatttatc

SEQ ID NO: 3600 - DNA, 225 bp, Unknown
  bacterial strain Ascusb_2212 encodes 16S rRNA
agagtttgatcctggctcaggatgaacgctagctacaggcttaacacatgcaagtcgaggggcatcaggacgatagcttgctattgttgctggcgaccggcgcacgggtgagtaacgcgtatccaaccttccccatagtaggggatagcccggcgaaagtcggattaatactctatgttcttcaatgcggacatctaatttgaagcaaagatttatcgctatggg

SEQ ID NO: 3601 - DNA, 225 bp, Unknown
  bacterial strain Ascusb_14185 encodes 16S rRNA
agagtttgatcctggctcaggatgaacgctagctacaggcttaacacatgcaagtcgaggggtaacattggctgagcttgctcagccagatgacgaccggcgcacgggtgagtaacgcgtatccaacctgcccatgggtcagggataaactcccgaaagggagcctaatacctgatgttatgagaagaaggcctctgattttcacgaaagacttcggtcgccgat

SEQ ID NO: 3602 - DNA, 225 bp, Unknown
  bacterial strain Ascusb_16164 encodes 16S rRNA
agagtttgatcctggctcaggatgaacgctggcggcgtgcttaacacatgcaagtcgaacggaacttttctcccgacgaagcggagagcttgctcaatgctaagtcatttgaaaagtttagtggcggacgggtgagtaacgcgtgggtaacctgccatatacagggggataacacttagaaataggtgctaataccgcataagcgcacagtaccgcatggtacag

SEQ ID NO: 3603 - DNA, 225 bp, Unknown
  bacterial strain Ascusb_4585 encodes 16S rRNA
agagtttgatcatggctcaggatgaacgctggcggcgtgcctaacacatgcaagtcgaacgaagcacttttaccggagattcgtcgaaggtgaatttgacttagtggcggacgggtgagtaatgtatgagcaacctgcctttcagtgggggacaacagttggaaacgactgctaataccgcataacgtacagagggggcatcccttttgtaccaaaggagtaatt

SEQ ID NO: 3604 - DNA, 225 bp, Unknown
  bacterial strain Ascusb_9466 encodes 16S rRNA
agagtttgatcatggctcaggatgaacgctagcggcaggcttaacacatgcaagtcgaggggtaacagagggtagcaataccctgctgacgaccggcgcacgggtgcgtaacgcgtatgcaacctacctgtaacaggggaataacggagtgaaaattccactaataccccatattgttattctttcgcatgttaggataacgaaagcttcggtggttacggatgg

SEQ ID NO: 3605 - DNA, 225 bp, Unknown
  bacterial strain Ascusb_3357 encodes 16S rRNA
agagtttgatcatggctcaggatgaacgctggcggcgtgcttaacacatgcaagtcgaacggaactgcttttgaagattttcttcggaaatgattcagttgtagtttagtggcggacgggtgagtaacgcgtgagtaacctgcccttgagagggggataacgttctgaaaaggacgctaataccgcataacattattgagtcgcatggcttgataatcaaaactc

SEQ ID NO: 3606 - DNA, 225 bp, Unknown
  bacterial strain Ascusb_6686 encodes 16S rRNA
agagtttgatcatggctcaggatgaacgctagcggcaggcttaacacatgcaagtcgaggggcagcgcggaagtagcaatacttttggcggcgaccggcgcaagggtgcgtaacgcgtgagcgacatgcccgtaaccgggggataaccgatggaaacgtcgcctaaccccccataacactggaggttgcatgattttcagttgaaaactttggtggttacggatt

SEQ ID NO: 3607 - DNA, 225 bp, Unknown
  bacterial strain Ascusb_2695 encodes 16S rRNA
agagtttgatcatggctcaggatgaacgctagcgacaggcctaacacatgcaagtcgaggggcagcgcgggagaagcttgcttttcctggcggcgaccggcgcacgggtgcgtaacaggtgtgcaatctgtcctataccggggcatagcccagcgaaagttggattaattctccatgtgaaacgaagccgcatgactttgttttgaaacgtaagggtatagggtg

SEQ ID NO: 3608 - DNA, 225 bp, Unknown
  bacterial strain Ascusb_7846 encodes 16S rRNA
agagtttgatcatggctcaggatgaacgctggcggcgtgcctaatacatgcaagtcgagcgagaatctgatgacttgagattcgtcaatatgattcagaggaaagcggcggacgggtgagtaacgcgtaggcaacctgcccttagcagagggatagccattggaaacgatgattaaaacctcataatgctcttggaacacatgctctgagagccaaagatttatc

SEQ ID NO: 3609 - DNA, 225 bp, Unknown
  bacterial strain Ascusb_13151 encodes 16S rRNA
agagtttgatcatggctcaggattaacgctggcggcatgcctaagacatgcaagtcgaacgaagagccccattgagaatggaaataaactgaagagcttgctcggatgtggaaataaataggatttggattctgctcttagtggcgaacgggtgagtaacacgtgggttacctgccttcaagctggggataacagctagaaatggttgctaataccgaatgtgct

SEQ ID NO: 3610 - DNA, 225 bp, Unknown
  bacterial strain Ascusb_4889 encodes 16S rRNA
agagtttgatcctggctcaggacgaacgctggcggcgtgcttaacacatgcaagtcgaacgaggatcatggagagcttgcttgaaatgattcgagtggcggacgggtgagtaacgcgtgaataatctgtcctatacagggggataacgcatcgaaagatgtgctaataccgcgtaggaccacggtgaggcatctcactgaggtgaaaggagtaatccagtatagg

SEQ ID NO: 3611 - DNA, 225 bp, Unknown
  bacterial strain Ascusb_131 encodes 16S rRNA
agagtttgatcctggctcaggatgaacgctggcggcgtgcttaacacatgcaagtcgaacggggtttacgagaagcttgctttttgtaaacctagtggcggacgggtgagtaacgcgtgagtaacctgccttagactgggggataacacttagaaataggtgctaataccgcataagcgcacagtatcgcatgatacagtgtgaaaaactccggtggtctaagat

SEQ ID NO: 3612 - DNA, 225 bp, Unknown
  bacterial strain Ascusb_2965 encodes 16S rRNA
agagtttgatcatggctcaggatgaacgctagcgacaggcctaacacatgcaagtcgaggggcagcgcgggagaagcttgcttttcctggcggcgaccggcgcacgggtgcgtaacaggtgtgcaatctgtcctataccggggcatagcccagcgaaagttggattaactccccatgtgtcactgagccgcatgacttagtgatgaaacgttagggtatagggtg

SEQ ID NO: 3613 - DNA, 225 bp, Unknown
  bacterial strain Ascusb_3258 encodes 16S rRNA
agagtttgatcatggctcaggatgaacgctagcggcaggcttaacacatgcaagtcgaggggcagcgtggagtagcaatactctgacggcgaccggcgaaagggtgagtaacgcgtgagcaacatgcccgatagagggggatagtcattggaaacgatgcgtaataccccgtaacattcggaaccgcatgattctgaattgaaagatttattgctatcggattgg

SEQ ID NO: 3614 - DNA, 225 bp, Unknown
  bacterial strain Ascusb_1706 encodes 16S rRNA
agagtttgatcatggctcaggatgaacgctggcggcgtgcttaacacatgcaagtcgagcgaagcattttcgctgatttcttcggattgaagcggatctgacttagcggcggacgggtgagtaacgcgtggggaacctgccccataccgggggataacagttagaaatgactgctaataccgcataagcgcacacggaggcatctccgagtgtgaaaaactccgg

SEQ ID NO: 3615 - DNA, 225 bp, Unknown
  bacterial strain Ascusb_7103 encodes 16S rRNA
agagtttgatcatggctcaggatgaacgctggcggcgtgcctaacacatgcaagtcgaacggaactgcatttgaagattccttcgggatgattcgtttgtagtttagtggcggacgggtgagtaacgcgtgagtaacctgcccttcagagggggataacgttctgaaaaggacgctaataccgcataacactgttttatcgcatgatagaacagtcaaaactcag

SEQ ID NO: 3616 - DNA, 225 bp, Unknown
  bacterial strain Ascusb_1658 encodes 16S rRNA
agagtttgatcctggctcaggatgaacgctggcggcgtgcctaacacatgcaagtcgaacgggactatttcagatcttttcggagtgatgatctagtttagtggcggacgggtgagtaacgcgtggacaacctgcctctcactgggggatagcagctggaaacggctggtaataccgcatgcgttcaatgtgccgcatgacacattgaagaaagatttatcggtg

SEQ ID NO: 3617 - DNA, 225 bp, Unknown
  bacterial strain Ascusb_6222 encodes 16S rRNA
agagtttgatcatggctcaggatgaacgctagcggcaggcctaacacatgcaagtcgaggggcagcagggcgtagcaatacgctgctggcgaccggcgcacgggtgcgtaacgcgtatgcaacctacccataacagggggataacggagtgaaaattccactaataccccgtattgccacatagtcgcatggcttagtggcgaaagccttcgggtggttatggat

SEQ ID NO: 3618 - DNA, 225 bp, Unknown
  bacterial strain Ascusb_4663 encodes 16S rRNA
agagtttgatcctggctcaggacgaacgctggcggcgtgcttaacacatgcaagtcgagcggagacatgtaacggaaagcttcggctggaagatatatgttttagcggcggacgggtgagtaacgcgtgagcaacctgtccttcacagggggataagataccgaaaggtgttctaataccgcataagaccacaatgtcgcatggcgaaggggtcaaaggagcaat

SEQ ID NO: 3619 - DNA, 225 bp, Unknown
  bacterial strain Ascusb_7209 encodes 16S rRNA
agagtttgatcatggctcaggatgaacgctagctacaggcttaacacatgcaagtcgaggggcatcaggacgatagcttgctattgttgctggcgaccggcgcacgggtgagtaacgcgtatccaaccttccccttagtagcggatagcccggcgaaagtcggattaatacgctatgttatccgaagaggacatctgaattggattaaagattgatcgctaaggg

SEQ ID NO: 3620 - DNA, 225 bp, Unknown
  bacterial strain Ascusb_16319 encodes 16S rRNA
agagtttgatcctggctcaggatgaacgctggcggcgtgcctaatacatgcaagtcgaacgagggtgcttgcaccctagtggcgaacgggtgagtaacacgtaggtaacctgcccttaagcttgggatacccagaggaaactttggctaataccggataacaacagagaaggcatcttctttgcttgaaaggcccttcacggggtcacttaaggatggacctgcg

SEQ ID NO: 3621 - DNA, 225 bp, Unknown
  bacterial strain Ascusb_4348 encodes 16S rRNA
agagtttgatcatggctcagaacgaacgctggcggcgcgtcttaagcatgcaagtcgagcgggagtacctagcttgctaggtatgagagcggcggactggtgagtaacgcgtgggtgacgtaccctccggacggggatagctcctagaaataggaggtaataccggatacggtgtatgttgtcagaggacatacaggaaagcagcctttgctgcgccggaggagc

SEQ ID NO: 3622 - DNA, 225 bp, Unknown
  bacterial strain Ascusb_20487 encodes 16S rRNA
agagtttgatcatggctcaggatgaacgctagctacaggcttaacacatgcaagtcgaggggcagcattgggatagcttgctattccagatggcgaccggcgcacgggtgagtaacgcgtatccaaccttccccgtagtagggcacagcccggcgaaagtcggattaattccctatgttgtttgatgcggacatctaattcaaaccaaagatttatcgctatggg

SEQ ID NO: 3623 - DNA, 225 bp, Unknown
  bacterial strain Ascusb_3117 encodes 16S rRNA
agagtttgatcatggctcaggatgaacgctggcggcgcgcctaacacatgcaagtcgaacggcgacggggcttcggcccctgaacagtggcggacgggtgagtaacgcgtgagtaacctgccccggtgagcggaataacgtccggaaacagacgctaataccgcatgacacatacttctggcatcgggagtatgtcaaagaattatcgcaccgggatggactcgc

SEQ ID NO: 3624 - DNA, 225 bp, Unknown
  bacterial strain Ascusb_2982 encodes 16S rRNA
agagtttgatcctggctcaggatgaacgctggcggcgtgcttaatacatgcaagtcgaacgaagcacttatgacagatcccctcggggtgaagacgtttgtgacttagtggcggacgggtgagtaacgcgtgggtaacctgccttatgcagggggataacagttagaaatgactgctaataccgcataagcgcacggcaccgcatggtgcagtgtgaaaagattt

SEQ ID NO: 3625 - DNA, 225 bp, Unknown
  bacterial strain Ascusb_3203 encodes 16S rRNA
agagtttgatcatggctcaggacgaacgctggcggcgtgcctaacacatgcaagtcgaacggagttgctgaggatttcggtttgaagcaacttagtggcggacgggtgagtaacgcgtgagtaacctgccgatgagagggggataacgttctgaaaagaacgctaataccgcataacgtatcgaagccgcatgactttgataccaaaggagcaatccgctcattg

SEQ ID NO: 3626 - DNA, 225 bp, Unknown
  bacterial strain Ascusb_9392 encodes 16S rRNA
agagtttgatcatggctcaggataaacgctggcggcgtgcctaatacatgcaagtcgatcgctggagctccagcttgctggagcgaaggagaggcgaacgggtgagtaatacataagcaacctgcccacgaagactgggataattcctggaaacggggactaataccggataggcagcgtgatcgcatgatcgtgctgttaaagattcaaagcactggtggatgg

SEQ ID NO: 3627 - DNA, 225 bp, Unknown
  bacterial strain Ascusb_5018 encodes 16S rRNA
agagtttgatcatggctcaggatgaacgctggcggcgtgcctaacacatgcaagtcgagcgggaatcgacggacagaagcttcggcagacggaagttgaggagagcggcggacgggtgagtaacgcgtaggtaacctaccttatgcacagggatagccccgggaaactggaattaatacctgatgaagcggtgaagtcacatggctttatcgccaaagatttatc

SEQ ID NO: 3628 - DNA, 225 bp, Unknown
  bacterial strain Ascusb_3635 encodes 16S rRNA
agagtttgatcatggctcaggatgaacgctggcggcgtgcctaatacatgcaagtcgagcgagaagaaagaaaatgaagcttcggtagatttttctttccgaaagcggcggacgggtgagtaacgcgtaggcaacctgccccttgcacagggatagccattggaaacgatgattaatacctgataacgctgagagaatgcatattcattcagccaaagatttatc

SEQ ID NO: 3629 - DNA, 225 bp, Unknown
  bacterial strain Ascusb_4648 encodes 16S rRNA
agagtttgatcctggctcaggacgaacgctggcggcgtgcttaacacatgcaagtcgaacggggattatgagaatgagagcttcggcaggattttttataattctagtggcggacgggtgagtaacgcgtgagcaacctgtcccagacagggggataacacttggaaacaggtgctaataccgcataagaccacggggagacatctacctggggtaaaaggtgca

SEQ ID NO: 3630 - DNA, 225 bp, Unknown
  bacterial strain Ascusb_3654 encodes 16S rRNA
agagtttgatcatggctcaggacgaacgctggcggcgtgcctaacacatgcaagtcgaacggagataatttggatgaagatttcggttggattccgttttatcttagtggcggacgggtgagtaacgcgtgagtaacctgccgacgagagtggaataacgttctgaaaagaacgctaataccgcataacatagagggacggcatcgtccttctatcaaagatttt

SEQ ID NO: 3631 - DNA, 225 bp, Unknown
  bacterial strain Ascusb_6309 encodes 16S rRNA
agagtttgatcctggctcaggatgaacgctagcgacaggcctaacacatgcaagtcgagcggcagcacctcgggtggcgagcggcgcacgggtgagtaacgcgtatgtaacctgcccatgagtggggaatagcccggtgaaaaccggattaatgccccatgacaccggaatttgacatcttataccggttaaagattcattgctcatggatggacatgcgttgga

SEQ ID NO: 3632 - DNA, 225 bp, Unknown
  bacterial strain Ascusb_1036 encodes 16S rRNA
agagtttgatcatggctcaggatgaacgctagctacaggcttaacacatgcaagtcgaggggcagcattgagatagcttgctatttcagatggcgaccggcgcacgggtgagtaacgcgtatccaaccttccccatagtagaggatagcccggcgaaagtcggattaatactctatgttgttcaatgcggacatctaagttgaaccaaaggtttaccgctatggg

SEQ ID NO: 3633 - DNA, 225 bp, Unknown
  bacterial strain Ascusb_1463 encodes 16S rRNA
agagtttgatcctggctcaggacgaacgctggcggcgtgcctaacacatgcaagtcgaacggagctgtttcacgaaggtcttcggattggacgagacagcttagtggcggacgggtgagtaacgcgtgagcaacctgcctttcagagggggacaacggttggaaacgaccgctaataccgcatgaagcaatcggaccgcatgatctggttgccaaagattttatc

SEQ ID NO: 3634 - DNA, 225 bp, Unknown
  bacterial strain Ascusb_399 encodes 16S rRNA
agagtttgatcatggctcaggatgaacgctggcggcgtgcttaacacatgcaagtcgaacgggacttgagaattgaagtactcgtatggattttcttaagtttagtggcggacgggtgagtaacgcgtgggcaacctgccgtatgcagggggacaacagctggaaacggctgctaataccgcataagcgcacagcaccgcatggtgcagtgtgaaaagatttatc

SEQ ID NO: 3635 - DNA, 225 bp, Unknown
  bacterial strain Ascusb_824 encodes 16S rRNA
agagtttgatcctggctcaggatgaacgctggcggcgtgcttaacacatgcaagtcgaacggttaaagcccccctcggggggtgcataaagtggcgaacgggtgagtaacacgtgggcaacctgcccctcacaccgggataacacggtgaaaaccgtgctaataccggatactccgcgaccgtggcatctcggtcgcgggaaagcccaggcggtgagggatgggc

SEQ ID NO: 3636 - DNA, 225 bp, Unknown
  bacterial strain Ascusb_6669 encodes 16S rRNA
agagtttgatcctggctcaggatgaacgctggcggcgtgcttaacacatgcaagtcgaacggacatgtaacaccgctgttgatctagcttgctattgacgcagcaccgttgcatgttagtggcggacgggtgagtaacgcgtgggtaacctgcctttatccgggggataacagttagaaatgactgctaataccgcataagcgcacgagggggcatccttttgtg

SEQ ID NO: 3637 - DNA, 225 bp, Unknown
  bacterial strain Ascusb_5208 encodes 16S rRNA
agagtttgatcatggctcaggatgaacgctggcggcgtgcctaatacatgcaagtcgagcgagaaatccttgattgactcttcggatgatttcatggatggaaagcggcggacgggtgagtaacgcgtaggcaacctgccccttgcacagggatagccactggaaacggtgattaatacctgataatgcagttcagtagcatttcagaactgccaaagatttatc

SEQ ID NO: 3638 - DNA, 225 bp, Unknown
  bacterial strain Ascusb_13335 encodes 16S rRNA
agagtttgatcatggctcaggatgaacgctggcggcgtgcttaacacatgcaagtcgaacgaagctcctatcatgatttcttcggaatgacttttaggatgacttagtggcggacgggtgagtaacgcgtgaggaacctgcctcgcagtggggaataacagttggaaacgactgctaataccgcataacgcaaagagatcgcatgttttctttgccaaagattta

SEQ ID NO: 3639 - DNA, 225 bp, Unknown
  bacterial strain Ascusb_3083 encodes 16S rRNA
agagtttgatcatggctcaggatgaacgctggcggcgtgcttaacacatgcaagtcgaacgaagcattaggtttgatttcttcggattgaagaccatatgacttagtggcggacgggtgagtaacgcgtgggcaatctgccccataccgggggacaacagttggaaacgactgctaataccgcataagcgcacggcatcgcatggtgcagtgtgaaaaactccgg

SEQ ID NO: 3640 - DNA, 225 bp, Unknown
  bacterial strain Ascusb_7073 encodes 16S rRNA
agagtttgatcatggctcaggacgaacgctggcggcgtgcttaacacatgcaagtcgaacgaggttattttgatgagatcttcggaaggattcggaataaccgagtggcggacgggtgagtaacgcgtgagcaacctgtcttacacagggggataacgctccgaaaggagtgctaataccgcataggaccacgatgctgcatggcattggggtgaaaggagcaat

SEQ ID NO: 3641 - DNA, 225 bp, Unknown
  bacterial strain Ascusb_6290 encodes 16S rRNA
agagtttgatcctggctcaggatgaacgctggcggcgtgcctaatacatgcaagtcgagcgagaatctgatgatctgcgattcgtcaaagagaatcagaggaaagcggcggacgggtgagtaacgcgtaggcaacctgcccttagcagagggatagccattggaaacgatgattaaaacctcataatgctgttgagacacatgtttcgacagccaaagatttatc

SEQ ID NO: 3642 - DNA, 225 bp, Unknown
  bacterial strain Ascusb_3305 encodes 16S rRNA
agagtttgatcatggctcaggatgaacgctagctacaggcctaacacatgcaagtcgaggggcagcagatcgaaagcttgcttttgatgctggcgaccggcgaatgggtgagtcacgcgtgtccaacctgccctgtgcccggggatagcccttggaaatgaggattaacacccgataggtggcgcttccgcatggcggcgccatgaaaccgacacaggatgggga

SEQ ID NO: 3643 - DNA, 225 bp, Unknown
  bacterial strain Ascusb_1282 encodes 16S rRNA
agagtttgatcatggctcaggatgaacgctggcggcgtgcctaatacatgcaagtcgaacggcagtagcaatactgtagtggcgaacgggtgagtaacacgttggtgacctgccccaaagatgggaatatcacctggaaacgggtggcaaaaccgaataagctcgagggagttagagagccttgagtaaaagcgtaagctactttgggaggggcctgcggcccat

SEQ ID NO: 3644 - DNA, 225 bp, Unknown
  bacterial strain Ascusb_6545 encodes 16S rRNA
agagtttgatcctggctcagaacgaacgctggcggcaggcctaacacatgcaagtcgagcgtgaaaggggcttcggccctgagtaaagcggcgcacgggtgagtaacacgtgaataatctgcccttgagaccgggataacagaccgaaaggactgctaataccggataagcccacagaccaaccgggtgtgtgagaaaagagcgggaatcttcggatccgttcac

SEQ ID NO: 3645 - DNA, 225 bp, Unknown
  bacterial strain Ascusb_3550 encodes 16S rRNA
agagtttgatcctggctcaggatgaacgctggcggcgtgcctaacacatgcaagtcgaacggggttgagcagaaattttcggatggaagctcaacttagtggcggacgggtgagtaacgcgtggataacctgcctcacacagggggatagcagctggaaacggctggtaataccgcataagaccacagtgccgcatggcacaggggtaaaagatttatcggtgtg

SEQ ID NO: 3646 - DNA, 225 bp, Unknown
  bacterial strain Ascusb_2900 encodes 16S rRNA
agagtttgatcatggctcaggatgaacgctggcggcgtgcttaacacatgcaagtcgaacgaagcactgaagaatggagattcgtcaaagttcttctttgactgagtggcgaacgggtgagtaatgcgtgagcaacctgcccttcagagggggacaacagttggaaacgactgctaataccgcatgacgtgtttggaaggcatcttcgggacaccaaaggagaaa

SEQ ID NO: 3647 - DNA, 225 bp, Unknown
  bacterial strain Ascusb_2563 encodes 16S rRNA
agagtttgatcatggctcaggacgaacgctggcggcgtgcctaacacatgcaagtcgaacggagcgaaagcagcttgctgctggagcttagtggcggacgggtgagtaacacgtgagtaacctgcctttcagaggggaataatgtttggaaacggacactaataccgcataacatacaatcaacgcatgttgaatgtatcaaaggagcaatccgctgaaagatgg

SEQ ID NO: 3648 - DNA, 225 bp, Unknown
  bacterial strain Ascusb_2765 encodes 16S rRNA
agagtttgatcatggctcaggacgaacgctggcggcacgcctaacacatgcaagtcgaacggagattgcttagcttgctatgcgatcttagtggcggacgggtgagtaacacgtgagcaacctgcctctgagagagggatagcttctggaaacggatggtaatacctcataatgtagtgaaaccgcatgattttgctaccaaagatttatcactcagagatgggc

SEQ ID NO: 3649 - DNA, 225 bp, Unknown
  bacterial strain Ascusb_2001 encodes 16S rRNA
agagtttgatcatggctcaggatgaacgctagcggcaggcttaacacatgcaagtcgaggggcagcggagagtagcaatactctgccggcgaccggcgaaagggtgcgtaacgcgtgagcaacttgcccgtatccgggacataagcggtggaaacgccgtctaatttcccataacaacgagggccgcatgacccatgtttgaaagatccgtcggatacggatggg

SEQ ID NO: 3650 - DNA, 225 bp, Unknown
  bacterial strain Ascusb_5071 encodes 16S rRNA
agagtttgatcctggctcaggatgaacgctagctacaggcttaacacatgcaagtcgcggggcatcgcatggggcggcaacgtccctggcggcgaccggcggatgggtgagtaacgcgtatccaacctggccccctctccgggacagcccctcgaaagagggattaataccggatgttccctttatgccgcatggcgtgatgggcaaaggcttcggtcggaaggg

SEQ ID NO: 3651 - DNA, 225 bp, Unknown
  bacterial strain Ascusb_18075 encodes 16S rRNA
agagtttgatcctggctcaggatgaacgctggcggcgtgcttaacacatgcaagtcgaacggagcatattttctgatttcttcggactgaaggagatatgacttagtggcggacgggtgagtaacgcgtgggcaacctgcctcacacagggggacaacagttggaaacgactgctaataccgcataagcgcacagtaccgcatggtacagtgtgaaaagccgaga

SEQ ID NO: 3652 - DNA, 225 bp, Unknown
  bacterial strain Ascusb_6117 encodes 16S rRNA
agagtttgatcatggctcaggatgaacgctagcggcaggcttaacacatgcaagtcgaggggcagcgggtccagcaatggatgccggcgaccggcgcaagggtgcgtaacgcgtgagcgacatgcccgtgaccgggggataaccgatggaaacgtcgcctaaccccccatatgattatccatcgcatggtggatgattgaaaaccgtggtggtcacggattggct

SEQ ID NO: 3653 - DNA, 225 bp, Unknown
  bacterial strain Ascusb_176 encodes 16S rRNA
agagtttgatcatggctcaggatgaacgctggcggcgtgcttaacacatgcaagtcgaacgaggctgcattgcggaagttttcggatggaagcgatgttgaccgagtggcggacgggtgagtaacgcgtggggaacctgccccattccgggggataccagttggaaacgactgttaataccgcataagcgcacagtgagacatctcacagtgtgaaaaactgagg

SEQ ID NO: 3654 - DNA, 225 bp, Unknown
  bacterial strain Ascusb_12861 encodes 16S rRNA
agagtttgatcctggctcaggatgaacgctggcggcgtgcttaacacatgcaagtcgaacggagatatgcgctgattgaagcttcggcagaaatcatgtatctcttagtggcggacgggtgagtaacgcgtgggtaacctgccttataccgggggataacacttagaaataggtgctaataccgcataagcgcacgacaccgcatggtgatgtgtgaaaaactcc

SEQ ID NO: 3655 - DNA, 225 bp, Unknown
  bacterial strain Ascusb_5974 encodes 16S rRNA
agagtttgatcatggctcaggacgaacgctggcggcgtgcttaacacatgcaagtcgaacggagttaagcgctggtctgatgctagcttgctagtggatttccttgcttaacttagtggcggacgggtgagtaacgcgtgagtaacctgcccttcagtggggaataacgccctgaaaagagcgctaataccgcataacatacagttgtcgcatggcagttgtatc

SEQ ID NO: 3656 - DNA, 225 bp, Unknown
  bacterial strain Ascusb_4116 encodes 16S rRNA
agagtttgatcatggctcaggattaacgctggcggcatgcctaatacatgcaagtcgaacgagcagcaatgctagtggcgaacgggtgagtaacacgtagggaacctgccctttagacgaggataactactggaaacggtggctaaaactggatagtatacaagaaggcatcttcgtgtatttaaaggtcctgcaagggaacgctaaaggatggtcctgcggagc

SEQ ID NO: 3657 - DNA, 225 bp, Unknown
  bacterial strain Ascusb_2952 encodes 16S rRNA
agagtttgatcctggctcaggatgaacgctggcggcgtgcctaacacatgcaagtcgaacgaagcatcgcgcccgggaaagtggagtgcttgcacaaagcggacccaattgtgatgacttagtggcggacgggtgagtaacgcgtgggtaacctgccgtatgcagggggataacagttagaaatgactgctaataccgcataagcgcacagcttcgcatggagca

SEQ ID NO: 3658 - DNA, 225 bp, Unknown
  bacterial strain Ascusb_2474 encodes 16S rRNA
agagtttgatcatggctcaggatgaacgctggcggcgtgcttaacacatgcaagtcgaacggacttgttccgctgtaagacgacgtgcttgcattgaatcttacttggaacaagttagtggcggacgggtgagtaacgcgtggggaacctgcctgtatctgggggataacagttagaaatgactgctaataccgcataagcgcacactgtcgcatgacagagtgt

SEQ ID NO: 3659 - DNA, 225 bp, Unknown
  bacterial strain Ascusb_1756 encodes 16S rRNA
agagtttgatcctggctcaggatgaacgctggcggcgtgcttaacacatgcaagtcgaacgagcgagttcccttcgggggacaagcgagtggcggacgggtgagtaacgcgtgggtaacctgcctcatacagggggataacagtcagaaataactgctaataccgcataagcgcacagtaccgcatggtacagtgtgaaaagctccggcggtatgagatggaccc

SEQ ID NO: 3660 - DNA, 225 bp, Unknown
  bacterial strain Ascusb_2650 encodes 16S rRNA
agagtttgatcctggctcaggacgaacgctggcggcgtgcttaacacatgcaagtcgaacgaggattacgagattgagagcttcggcaggatagatcgtaattcgagtggcggacgggtgagtaacgcgtgagcaatctgtcccagacaggggaataacacttggaaacaggtgctaataccgcataagaccacggggaggcatcttcctggggtaaaaggagta

SEQ ID NO: 3661 - DNA, 225 bp, Unknown
  bacterial strain Ascusb_3092 encodes 16S rRNA
agagtttgatcatggctcaggatgaacgctagctacaggcttaacacatgcaagtcgaggggtaacattggcggagcttgctctgccagatgacgaccggcgcacgggtgagtaacgcgtatccaacctgcccatgggtcagggataaactcccgaaagggagcctaatacctgatgttgtgagaagaaggcctctgattttcacgaaagacttcggtcgccgat

SEQ ID NO: 3662 - DNA, 225 bp, Unknown
  bacterial strain Ascusb_15152 encodes 16S rRNA
agagtttgatcatggctcaggacgaacgctggcggcgtgcctaacacatgcaagtcgaacggggattttgtttcggcagaatcctagtggcgaacgggtgagtaacgcgtaggcaacctgccctccggccggggacaacactccgaaaggggtgctaataccggatacgaagtctgtgccgcatggtacggatttgaaagatggcctctgtttacaagctatcgc

SEQ ID NO: 3663 - DNA, 225 bp, Unknown
  bacterial strain Ascusb_4226 encodes 16S rRNA
agagtttgatcatggctcaggacgaacgctggcggcgtgcttaacacatgcaagtcgaacggggatatgtttgatgagagcttcggcaggaatcggatgtattctagtggcggacgggtgagtaacgcgtgagcaacctgtcccagacagggggataacacttggaaacaggtgctaataccgcataagaccacagcatcacatggtgcaggggtaaaaggtgga

SEQ ID NO: 3664 - DNA, 225 bp, Unknown
  bacterial strain Ascusb_2357 encodes 16S rRNA
agagtttgatcatggctcaggatgaacgctggcggcgtgcttaatacatgcaagtcgaacgaagcgcttacagccgatcccttcggggtgaagcagtttgtgacttagtggcggacgggtgagtaacgcgtgggtaacctgccttatgcagggggataacagttagaaatggctgctaataccgcataagcgcacggcaccgcatggtggagtgtgaaaagattt

SEQ ID NO: 3665 - DNA, 225 bp, Unknown
  bacterial strain Ascusb_7938 encodes 16S rRNA
agagtttgatcatggctcaggatgaacgctggcggcatgcctaagacatgcaagtcgaacgagatggccttttgaaaactgcgtacttgtacaaagttggattaagattttccatctagtggcagacgggtgagtaatacataagtaatctacctcagagactgggataacgtttggaaacgaacgctaataccggatgattcttcttacacaagtaagaatgct

SEQ ID NO: 3666 - DNA, 225 bp, Unknown
  bacterial strain Ascusb_3444 encodes 16S rRNA
agagtttgatcatggctcaggatgaacgctggcggcgtgcttaatacatgcaagtcgaacgaagcacttacgacagatcccctcggggtgaagatgtttgtgacttagtggcggacgggtgagtaacgcgtgggtaacctgcctcatgcagggggataacagttagaaatgactgctaataccgcataagcgcacgtgaccgcatggtcgagtgtgaaaagattt

SEQ ID NO: 3667 - DNA, 225 bp, Unknown
  bacterial strain Ascusb_2890 encodes 16S rRNA
agagtttgatcctggctcaggacgaacgctggcggcgtgcctaacacatgcaagtcgaacgagcgcacgggagcttgctcctgtgctgcgagtggcggacgggtgagtaacgcgtgaggaacctgcccttaagagggggataacgtccggaaacggacgctaataccgcataacatgtcgggatcgcatgattctgatatcaaaggagcaatccgcttaaggatg

SEQ ID NO: 3668 - DNA, 225 bp, Unknown
  bacterial strain Ascusb_7150 encodes 16S rRNA
agagtttgatcatggctcaggatgaacgctagctacaggcttaacacatgcaagtcgaggggcagcatggtggtagcttgctaccaccgatggcgaccggcgcacgggtgagtaacacgtatccaacctgccgtcagcttggggatagccctctgaaaggaggattaatacccgatgtggttgttggctgacatcagccttcaattaaagatttatcggctgtcg

SEQ ID NO: 3669 - DNA, 225 bp, Unknown
  bacterial strain Ascusb_2951 encodes 16S rRNA
agagtttgatcatggctcaggacgaacgctggcggcgcgcttaacacatgcaagtcgaacggagcttgaacgagcgtcttcggacaatcgatcaaacttagtggcggacgggtgagtaacgcgtgagcaaccggtcctgaagagggggacaacattgagaaatcaatgctaataccgcgtaagaccacactgcggcatcgcagaggggtcaaaggagagatccgc

SEQ ID NO: 3670 - DNA, 225 bp, Unknown
  bacterial strain Ascusb_6768 encodes 16S rRNA
agagtttgatcatggctcaggatgaacgctagcggcaggcttaacacatgcaagtcgaggggcatcgcggggtagcaatactctggcggcgaccggcgaaagggtgagtaacgcgtgagcaacattccgctttcagggggatagtcattggaaacgatgcgtaataccccgtatgacttatgcaggcatctgcgtaagttgaaagatttatcgggaggcgattgg

SEQ ID NO: 3671 - DNA, 225 bp, Unknown
  bacterial strain Ascusb_548 encodes 16S rRNA
agagtttgatcatggctcagaacgaacgctggtggcgtgtcttatacatgcaagtcgagcggtgcagcaatgcatagcggcgaacgggtgagtaacgcgtaagcaatctgccccatgcccgggaatagccgtgccaacgcgcgggtaataccggatatagtggctccctgcatagggggttgacgaaagatttatcggcatgggatgagcttgcgtccgattagc

SEQ ID NO: 3672 - DNA, 225 bp, Unknown
  bacterial strain Ascusb_2534 encodes 16S rRNA
agagtttgatcatggctcaggatgaacgctggcggcgtgcctaacacatgcaagtcgaacggggtatacgcgctgatgatcgaagtgcttgcatagagagaatcttgtgtatacttagtggcggacgggtgagtaacgtgtggataacctggtccatccagggggatagcagctggaaacggctggtaataccgcataagcgcacagtaaggcatcttacagtgt

SEQ ID NO: 3673 - DNA, 225 bp, Unknown
  bacterial strain Ascusb_2535 encodes 16S rRNA
agagtttgatcctggctcaggacgaacgctggcggcgtgcttaacacatgcaagtcgaacgagaatcaccggaaggagttttcggacaacggaaggtgaggacagtggcggacgggtgagtaacgcgtgaggaacctgcctctcagagggggacaacagttggaaacgactgctaataccgcataacgcagcggagtcgcatggctctgctgccaaagatttatc

SEQ ID NO: 3674 - DNA, 225 bp, Unknown; identical to SEQ ID NO: 2967
  bacterial strain Ascusb_2598 encodes 16S rRNA

SEQ ID NO: 3675 - DNA, 225 bp, Unknown
  bacterial strain Ascusb_1478 encodes 16S rRNA
agagtttgatcatggctcaggacgaacgctggcggcatgcctaacacatgcaagtcgaacggaactaaggggcttgccctttagtttagtggcggacgggtgagtaacgcgtgagcaacctgcctttcagtggggaataatatcctgaaaagggtactaataccgcataacgtaacgagatcgcatggttttgttaccaaagatttatcgctgagagatgggctc

SEQ ID NO: 3676 - DNA, 225 bp, Unknown
  bacterial strain Ascusb_1672 encodes 16S rRNA
agagtttgatcctggctcaggatgaacgctagctacaggcttaacacatgcaagtcgaggggcagcatgatcaaagcttgctttgattgatggcgaccggcgcacgggtgagtaacgcgtatccaaccttccctatagtagtggatagcccggcgaaagtcggattaatacactatgttattcaacgaggacatctgaaatgaatcaaaggtttaccgctatagg

SEQ ID NO: 3677 - DNA, 225 bp, Unknown
  bacterial strain Ascusb_2916 encodes 16S rRNA
agagtttgatcatggctcaggatgaacgctagctacaggcttaacacatgcaagtcgaggggcatcgagaagttagcttgctaactttgtcggcgaccggcgcacgggtgagtaacgcgtatccaaccttccccttagtaggggatagcccggcgaaagtcggattaataccctatgttatccgaagaggacatctgaattggatcaaaggtttaccgctaaggg

SEQ ID NO: 3678 - DNA, 225 bp, Unknown
  bacterial strain Ascusb_15862 encodes 16S rRNA
agagtttgatcctggctcaggatgaacgctggcggcatgcctaagacatgcaagtcgtacgagaaggcccactgaaattaatcgaaattggagtgcttgcacaataatggactttggtggaagtggattttccttcgagtggcaaacgggtgagtaacacgtgggttacctacctctaagacggggataccaattggaaacgattgttaataccggatgtgctct

SEQ ID NO: 3679 - DNA, 225 bp, Unknown
  bacterial strain Ascusb_908 encodes 16S rRNA
agagtttgatcatggctcaggatgaacgctagctacaggcttaacacatgcaagtcgaggggcagcatgatcttagcttgctaagattgatggcgaccggcgcacgggtgagtaacgcgtatccaaccttccccttagtagggcatagcccgtagaaatgcggattaataccctatgttgtatattgaggacatctgatttataccaaaggttcaccgctaaggg

SEQ ID NO: 3680 - DNA, 225 bp, Unknown
  bacterial strain Ascusb_3503 encodes 16S rRNA
agagtttgatcctggctcaggatgaacgctggcggcgtgcttaacacatgcaagtcgaacgaagctccggacgtggaggcttcggccaaagcagaaggaagacttagtggcggacgggtgagtaacgcgtgggtaacctgccatatacagggggataacagttagaaatgactgctaataccgcataagcgcacactgaggcatctcagggtgtgaaaagctcag

SEQ ID NO: 3681 - DNA, 225 bp, Unknown
  bacterial strain Ascusb_16454 encodes 16S rRNA
agagtttgatcatggctcaggatgaacgctggcggcgtgcctaacacatgcaagtcgaacggattttgctcgcagcagagacttcggtcgaagcttgagtaaagttagtggcggacgggtgagtaacgcgtgggcaacctgcctcatactgggggataacagttggaaacgactgttaataccgcataagcgcacagtgtcgcatgacacagtgtgaaaaactcc

SEQ ID NO: 3682 - DNA, 225 bp, Unknown
  bacterial strain Ascusb_9994 encodes 16S rRNA
agagtttgatcctggctcaggacgaacgctggcggcgtgcctaacacatgcaagtcgagcggggatagattggatgagagcttcggcaggattctgatttattctagcggcggacgggtgagtaacgcgtgaacgatctgtcccagacagggggataacacttggaaacaggtgctaataccgcataagaccacgtagctgcatggctatgaggtaaaaggagcg

SEQ ID NO: 3683 - DNA, 225 bp, Unknown
  bacterial strain Ascusb_5823 encodes 16S rRNA
agagtttgatcctggctcaggatgaacgctagctacaggcctaacacatgcaagtcgaggggcagcatggagcttgcttgcaagctctgatggcgaccggcgaatgggtgagtcacgcgtgtccaacctgccccgcgcccggggatagcccttggaaatgaggattaagacccgatacgtgcgttgtccgcatggacgtcgcatgaaaccaggcacgggatgggg

SEQ ID NO: 3684 - DNA, 225 bp, Unknown
  bacterial strain Ascusb_6965 encodes 16S rRNA
agagtttgatcatggctcaggatgaacgctggcggcgtgcctaacacatgcaagtcgagcgagaaatgctcaagtagagattcgtcaaagcgagagcatggacagcggcggacgggtgagtaacgcgtaggtaacctgccttgagctgcgggatagcctagggaaacctggattaataccacataatgcggaggagtcacatggctttttcgccaaagattcatc

SEQ ID NO: 3685 - DNA, 225 bp, Unknown
  bacterial strain Ascusb_326 encodes 16S rRNA
agagtttgatcctggctcaggacgaacgctggcggcacgcttaacacatgcaagtcgaacgagcgaaaggtgcttgcacctctagctagtggcggacgggtgagtaacacgtgagcaatctgcctttcggtgggggataccaattggaaacgattgttaataccccataacataacgaagccgcatgactttgttatcaaagatttattgccggaagatgagctc

SEQ ID NO: 3686 - DNA, 225 bp, Unknown
  bacterial strain Ascusb_3817 encodes 16S rRNA
agagtttgatcatggctcaggatgaacgctggcggcgtgcttaacacatgcaagtcgaacggagttatgatgtgtgagggatttagcttgctattgaccaaacttttcataacttagtggcggacgggtgagtaacgcgtgggtaacctgccttatacagggggataacagtcggaaacgactgctaataccgcataagcgcacagtatcgcatgatacagtgtg

SEQ ID NO: 3687 - DNA, 225 bp, Unknown
  bacterial strain Ascusb_4405 encodes 16S rRNA
agagtttgatcctggctcaggatgaacgctggcggcgtgcctaacacatgcaagtcgaacggagattagacgctgacgagacttcggtcaaatcttgtttaatcttagtggcggacgggtgagtaacgcgtgggcaacctgcctcgtaccgggggatagcagttggaaacgactgataataccgcataagcgcacggtatcgcatgatacagtgtgaaaaactcc

SEQ ID NO: 3688 - DNA, 225 bp, Unknown
  bacterial strain Ascusb_4895 encodes 16S rRNA
agagtttgatcctggctcaggatgaacgctagcgacaggcttaacacatgcaagtcgaggggcagcatgggaggtggcaacaccacccgatggcgaccggcgcactggtgagtaacacgtatgcaacctgccccctacaggggaataacccagagaaatttggcctaatgccccgtagtcctccgtgccgcatggcgtggaggggaaagatccgtcggtagggga

SEQ ID NO: 3689 - DNA, 225 bp, Unknown
  bacterial strain Ascusb_3689 encodes 16S rRNA
agagtttgatcatggctcaggatgaacgctagcggcaggcttaacacatgcaagtcgaggggcagcgagggtagcaatacctgtcggcgaccggcggaagggtgcgtaacgcgtgagcaacttgcccgtatcagggggataagcgttggaaacgacgtctaataccccataacaacagaccccgcatgaggtttgtttgaaagcttcggtggatacggataggct

SEQ ID NO: 3690 - DNA, 225 bp, Unknown
  bacterial strain Ascusb_3837 encodes 16S rRNA
agagtttgatcatggctcaggatgaacgctagcggcaggcttaacacatgcaagtcgaggggcatcgcggtgtagcaatacactggcggcgaccggcgaaagggtgagtaacgcgtgagcaacatacccggcactgggggatagtcattggaaacgatgcgtaataccccgtaacacaaggagcggcatcgcttcatgttaagagatttatcgataccggattgg

SEQ ID NO: 3691 - DNA, 225 bp, Unknown
  bacterial strain Ascusb_882 encodes 16S rRNA
agagtttgatcctggctcaggatgaacgctagcgacaggcttaacacatgcaagtcgaggggcagcgcgagggtagcaatacctttggcggcgaccggcgcactggtgagtaacacgtatgcgacctgccccggacagggggataaacccgggaaactgggcctaataccccatacgccccagaatcgcatggttttggggtgaaagatccgtcggtccgggatg

SEQ ID NO: 3692 - DNA, 225 bp, Unknown
  bacterial strain Ascusb_9646 encodes 16S rRNA
agagtttgatcatggctcaggatgaacgctagctacaggcttaacacatgcaagtcgaggggcagcatgatcttagcttgctaaggttgatggcgaccggcgcacgggtgagtaacgcgtatccaaccttccctatagtagaggatagcccggcgaaagtcggattaatactctatgttttccaatgcagacatctaaaatggaacaaaggtttaccgctatagg

SEQ ID NO: 3693 - DNA, 225 bp, Unknown
  bacterial strain Ascusb_2536 encodes 16S rRNA
agagtttgatcatggctcaggatgaacgctagcgacaggcctaacacatgcaagtcgagcggcagcacctcgggtggcgagcggcgcacgggtgagtaacgcgtatgtaacctgcccatgagtgggggatagcccggtgaaaaccggattaataccgcataataccattattagacatcttagaatggttaaagattcattgctcatggatggacatgcgttgga

SEQ ID NO: 3694 - DNA, 225 bp, Unknown
  bacterial strain Ascusb_3776 encodes 16S rRNA
agagtttgatcctggctcaggatgaacgctggcggcgtgcctaacacatgcaagtcgaacgaagcactttagcggaaccttcgggggaagctgttgtgactgagtggcggacgggtgagtaacgcgtgggtaacctgccctgtacagggggataacagccggaaatggctgctaataccgcataagcgcactgatggtagcattaccaggtgtgaaaaactccgg

SEQ ID NO: 3695 - DNA, 225 bp, Unknown
  bacterial strain Ascusb_4680 encodes 16S rRNA
agagtttgatcctggctcaggatgaacgctagctacaggcttaacacatgcaagtcgtggggcagcatggggtttgcttgcaaactctgatggcgaccggcgcacgggtgagtaacgcgtatccaacctggcccttagtaggggatagcccggcgaaagtcggattaataccctatgttttccaatgcagacatctaaaatggaacaaaggcttgccgctaaggg

SEQ ID NO: 3696 - DNA, 225 bp, Unknown
  bacterial strain Ascusb_3908 encodes 16S rRNA
agagtttgatcctggctcaggatgaacgctggcggcgtgcttaacacatgcaagtcgaacgaagcacatatttctgatttcttcggactgaagagatttgtgacttagtggcggacgggtgagtaacgcgtgggcaacctgcctcacactgggggacaacagttggaaacgactgctaataccgcataagcgcacactgatgcatatcagagtgtgaaaaactcc

SEQ ID NO: 3697 - DNA, 225 bp, Unknown
  bacterial strain Ascusb_6642 encodes 16S rRNA
agagtttgatcatggctcaggatgaacgctagctacaggcttaacacatgcaagtcgaggggcagcataagattagcttgctaatcttgatggcgaccggcgcacgggtgagtaacgcgtatccaaccttccccctgctcagggatagcccgctgaaaggcggattaacacctgatagcttcactagatggcatctgacggtgaataaagataacggcaagggat

SEQ ID NO: 3698 - DNA, 225 bp, Unknown
  bacterial strain Ascusb_1740 encodes 16S rRNA
agagtttgatcatggctcagaacgaacgctggcggcatggattaggcatgcaagtcgaacgggagcagcaatgctccagtggcgcaagggtgaggaacacgtgaacaacctgccttcgagttggggatagcttctggaaacgggagataataccgaataacatcatttggtcgcatgaccggatgatcaaagcagcaatgcgcttgaagaggggttcgcgtccca

SEQ ID NO: 3699 - DNA, 225 bp, Unknown
  bacterial strain Ascusb_6173 encodes 16S rRNA
agagtttgatcctggctcaggatgaacgctggcggcgtgcctaacacatgcaagtcgaacggggttatggtgaagttttcggacagaagcataacttagtggcggacgggtgagtaacgcgtggataacctgcctcgcacagggggatagcagctggaaacggctgataataccgcataagaccacgggaccgcatggtcctgtggtaaaagatttatcggtgcg

SEQ ID NO: 3700 - DNA, 225 bp, Unknown
  bacterial strain Ascusb_4476 encodes 16S rRNA
agagtttgatcctggctcaggatgaacgctggcggcgtgcttaacacatgcaagtcgaacggagtattgacgctgatgagcggagagcttgctcaaagcaaatcttgttgatacttagtggcggacgggtgagtaacgcgtgggtaacctgccatgtacagggggataacacttagaaataggtgctaataccgcataagcctacaggatcgcatgatccagtaa

SEQ ID NO: 3701 - DNA, 225 bp, Unknown
  bacterial strain Ascusb_1096 encodes 16S rRNA
agagtttgatcctggctcaggacgaacgctggcggcatgcctaacacatgcaagtcgaacggagttttggagcttgctccaaaactcagtggcggacgggtgagtaacgcgtgagtaacctgcctttcagtggggaataatattctgaaaagagtactaataccgcataatatacagaagtcgcatggcttttgtatcaaagatttattgctgagagatggactc

SEQ ID NO: 3702 - DNA, 225 bp, Unknown
  bacterial strain Ascusb_281 encodes 16S rRNA
agagtttgatcatggctcaggatgaacgctggcggcgtgcctaacacatgcaagtcgaacggagatatatttgacagagacttcggtcaatagattatatatcttagtggcggacgggtgagtaacgcgtggggaacctgccctgtactgggggataacagtgagaaatcactgctaaaaccgcataagcgcacactggcgcatgccagagtgtgaaaaactccg

SEQ ID NO: 3703 - DNA, 225 bp, Unknown
  bacterial strain Ascusb_16639 encodes 16S rRNA
agagtttgatcctggctcaggatgaacgctagctacaggcttaacacatgcaagtcgaggggaaacggcattttagcttgctaagatggacgtcgaccggcgaatgggtgagtaacgcgtatccaaccttccgttaagtagggaatagccttgcgaaagtaagattaatgccctatgtggtgttttgaggacatctgaagagcaccaaaggtttaccgcttaacg

SEQ ID NO: 3704 - DNA, 225 bp, Unknown
  bacterial strain Ascusb_3012 encodes 16S rRNA
agagtttgatcatggctcaggatgaacgctggcggcgtgcctaacacatgcaagtcgaacggggttaagacgctgatgatggaagtgcttgcacggaaagaatcttgttttaacttagtggcggacgggtgagtaacgtgtggataacctggcccatacagggggatagcagctggaaacggctgataataccgcataagcgcacaacatcgcatgatgcagtgt

SEQ ID NO: 3705 - DNA, 225 bp, Unknown
  bacterial strain Ascusb_3620 encodes 16S rRNA
agagtttgatcatggctcaggacgaacgctggcggcgtgcttcaaacatgcaagtcgaacggagtttgagggagcttgctcccgagaacttagtggcggacgggtgagtaacgcgtgagcaatctggctattacagggggataacacttggaaacgagtgctaataccgcgtatgaccacaacctggcatcgggaaggggtgaaaggagaaatccggtaatagat

SEQ ID NO: 3706 - DNA, 225 bp, Unknown
  bacterial strain Ascusb_1007 encodes 16S rRNA
agagtttgatcatggctcaggataaacgctggcggcgtgcttaacacatgcaagtcgaacggagttatttccttcggggaataacttagtggcggacgggtgagtaacgcgtgggtaacctgccctgcagagggggacaacagctggaaacggctgctaataccgcatacgccggagggatcgcatgattcttccgggaaagattcatcgctgcaggatggaccc

SEQ ID NO: 3707 - DNA, 225 bp, Unknown
  bacterial strain Ascusb_304 encodes 16S rRNA
agagtttgatcatggctcaggatgaacgctggcggcgtgcttaacacatgcaagtcgaacgaggctatacggcggaagttttcggatggaagcggtatagaccgagtggcggacgggtgagtaacgcgtggggaacctgccccattccgggggataccagttggaaacgactgttaataccgcataagcgcacggaaggacatccttcagtgtgaaaaactgagg

SEQ ID NO: 3708 - DNA, 225 bp, Unknown
  bacterial strain Ascusb_1000 encodes 16S rRNA
agagtttgatcatggctcaggataaacgctggcggcgcacataagacatgcaagtcgaacgaacttaatcctttagtttactataggaagcggttagtggcggactggtgagtaacgcgtaagcaatctgcctatcagaggggaacaacagtgagaaatcactgctaataccgcatatgctgtgagtatggcatcgtacaaacaggaaaggagcaatccgctgat

SEQ ID NO: 3709 - DNA, 225 bp, Unknown
  bacterial strain Ascusb_818 encodes 16S rRNA
agagtttgatcatggctcaggacgaacgctggcggcacgcttaacacatgcaagtcgaacggagtttttgagagcttgcttttaaaaacttagtggcggacgggtgagtaacacgtgagcaatctgcctttcagagggggatagcagttggaaacgactgataataccgcataatatatacggaccgcatgatctgtatatcaaagatttatcgctgaaagatga

SEQ ID NO: 3710 - DNA, 225 bp, Unknown
  bacterial strain Ascusb_6576 encodes 16S rRNA
agagtttgatcctggctcagggttaacgctggcatcgtgcataacacatgcaagtcgaacgggactttgctttgtagcaatacagagtaaagtttagtggcagacgggtgagtaatgtataagaaatccacctccgagtggggaataacagtccgaaaggattgctaataccccataacataataaagcggcatcgctttattatcaaagatttatcgcttggag

SEQ ID NO: 3711 - DNA, 225 bp, Unknown
  bacterial strain Ascusb_3865 encodes 16S rRNA
agagtttgatcatggctcaggatgaacgctagctacaggcttaacacatgcaagtcgaggggcatcagggtctgtgcttgcacagattgctggcgaccggcgcacgggtgagtaacgcgtatccaaccttccccttagtagaggatagcccggcgaaagtcggattaatactctatgttgttcaatgcggacatctaagttgaaccaaaggtttaccgctaaggg

SEQ ID NO: 3712 - DNA, 225 bp, Unknown
  bacterial strain Ascusb_1245 encodes 16S rRNA
agagtttgatcatggctcaggacgaacgctggcggcacgcctaacacatgcaagtcgaacggagatttgagagcttgctcttaaatcttagtggcggacgggtgagtaacacgtgagcaacctgcctctgagagagggatagcttctggaaacggatggtaatacctcataacgtagtttagccgcatgactgaactaccaaagatttatcactcagagatgggc

SEQ ID NO: 3713 - DNA, 225 bp, Unknown
  bacterial strain Ascusb_3813 encodes 16S rRNA
agagtttgatcatggctcaggacgaacgctggcggcgtgcctaacacatgcaagtcgaacggagatgcattgaatgaagatttcggttggatttcgatacatcttagtggcggacgggtgagtaacgcgtgagtaacctgccgatgagagtggaataacgttctgaaaaggacgctaataccgcataatgtagagcggccgcatgaccattctaccaaagatttt

SEQ ID NO: 3714 - DNA, 225 bp, Unknown
  bacterial strain Ascusb_4335 encodes 16S rRNA
agagtttgatcatggctcaggatgaacgctggcggcgtgcctaacacatgcaagtcgaacggagcagttccttcgggagctgcttagtggcggacgggtgagtaacgcgtgagcaacctgcccttcagagggggacaacagttggaaacgactgctaataccgcatgatgtatccgggaggcatcttctggataccaaagatttatcgctgaaggatgggctcgc

SEQ ID NO: 3715 - DNA, 225 bp, Unknown
  bacterial strain Ascusb_2297 encodes 16S rRNA
agagtttgatcatggctcaggatgaacgctggcggcgtgcttaacacatgcaagtcgaacggagtttagagagcttgctctttaaacttagtggcggacgggtgagtaacgcgtgggtaacctgcctttcactgggggataacagttagaaatgactgctaataccgcataagcgcacgggacggcatcgtctagtgtgaaaaactccggtggtgaaagatggac

SEQ ID NO: 3716 - DNA, 225 bp, Unknown
  bacterial strain Ascusb_4162 encodes 16S rRNA
agagtttgatcctggctcaggacgaacgctggcggcgtgcctaacacatgcaagtcgaacggacgaggggagcttgctccccgagttagtggcgaacgggtgagtaacgcgtgagcaacctgcctttcagagggggacaacggttggaaacgaccgctaataccgcatgatgcatttgaaccgcatgatttgaatgccaaagatttatcgctgaaagatgggctc

SEQ ID NO: 3717 - DNA, 225 bp, Unknown
  bacterial strain Ascusb_471 encodes 16S rRNA
agagtttgatcctggctcaggatgaacgctagctacaggcttaacacatgcaagtcgaggggtaacatggcgggagcttgctcctgccgatgacgaccggcgcacgggtgagtaacgcgtatccaacctgcccctgagtcggggataaccttccgaaagggagcctaatacccgatgttgtgcgaagaaggcatctgatttgcaccaaagatttatcgctcaggg

SEQ ID NO: 3718 - DNA, 225 bp, Unknown
  bacterial strain Ascusb_815 encodes 16S rRNA
agagtttgatcctggctcaggatgaacgctggcggcgtgcttaacacatgcaagtcgaacgaagcatttttgatgaagttttcggatggaattagagatgactgagtggcggacgggtgagtaacgcgtgggcaacctgccgtatacagggggacaacagttggaaacgactgctaataccgcataagcgcacggtctcgcatgggacagtgtgaaaaactccgg

SEQ ID NO: 3719 - DNA, 225 bp, Unknown
  bacterial strain Ascusb_3667 encodes 16S rRNA
agagtttgatcctggctcaggatgaacgctggcggcgtgcctaatacatgcaagtcgaacggcagcagcaatgctgtagtggcgaacgggtgagtaacacgttggtgacctgccccaaagatgggaatatcacctggaaacgggtggcaaaaccgaataagcttatcatagttagagagtgataagtaaaagcgaaagctactttgggaggggcctgcggcccat

SEQ ID NO: 3720 - DNA, 225 bp, Unknown
  bacterial strain Ascusb_6307 encodes 16S rRNA
agagtttgatcctggctcaggacgaacgctggcggcgtgcttcatacatgcaagtcgaacgagaagctgacttcggtcagtggaaagtggcggacgggtgagtaatatgtagagaatctgcccttgagtgggggacaacagagggaaacttctgctaataccccatatgagcttagttgaaatactaatcttgaaaactccggtgctcaaggatgagtctgcatc

SEQ ID NO: 3721 - DNA, 225 bp, Unknown
  bacterial strain Ascusb_4829 encodes 16S rRNA
agagtttgatcctggctcaggatgaacgctggcggcgtgcctaacacatgcaagtcgaacggagttatgaagacgatttcttcggattgaatcttcctaacttagtggcggacgggtgagtaacgcgtggataacctgccttgcacagggggatagcagttggaaacgactgataataccgcataagaccacggtaccgcatggtacagaggtaaaagatttatc

SEQ ID NO: 3722 - DNA, 225 bp, Unknown
  bacterial strain Ascusb_9316 encodes 16S rRNA
agagtttgatcatggctcaggatgaacgctggcggcgtgcttaacacatgcaagtcgaggggcatcgggagagtagcttgctattcttgccggcgaccggcgcacgggtgagtaacgcgtatccaacctaccccatacaagaggatagcccggcgaaagtcggattaatactctatgtagtacgatgaaggcatctgagttgtatgaaaggtttcttccggtatg

SEQ ID NO: 3723 - DNA, 225 bp, Unknown
  bacterial strain Ascusb_2122 encodes 16S rRNA
agagtttgatcatggctcagaacgaacgctggcggcaggcctaaaacatgcaagttgaacggctgtagcaatacagcagtagcgcaagggtgagtaatgtatgggaacgtatcttttggtggggaatattctttggaaacgaagagcaataccgcataagccctacgggggaaagatttatcgccgattgagcggcccatattggattagctagttggttaggta

SEQ ID NO: 3724 - DNA, 225 bp, Unknown
  bacterial strain Ascusb_1161 encodes 16S rRNA
agagtttgatcatggctcaggataaacgctggcggcgtgcctaatacatgcaagtcgatcgctggaattcaagcttgcttgaatgaaggagaggcgaacgggtgagtaatacataagcaacctgcccacgaagactgggataattcctggaaacggggactaataccggataggcaataatgacgcatgtcaatattgttaaaggttaaaaacactggtggatgg

SEQ ID NO: 3725 - DNA, 225 bp, Unknown; identical to SEQ ID NO: 2558
  bacterial strain Ascusb_10976 encodes 16S rRNA

SEQ ID NO: 3726 - DNA, 225 bp, Unknown
  bacterial strain Ascusb_2880 encodes 16S rRNA
agagtttgatcatggctcaggattaacgctggcggcgtgcttaacacatgcaagtcgaacggggtatgaggcttcggccttatacttagtggcggacgggtgagtaacgcgtgggcaacctgccctgtaccgggggacaacagctggaaacggctgctaataccgcataagcgcacgaaaccgcatggttttgtgtgaaaagatttatcagtacaggatgggccc

SEQ ID NO: 3727 - DNA, 225 bp, Unknown
  bacterial strain Ascusb_4527 encodes 16S rRNA
agagtttgatcctggctcaggatgaacgctggcggcgtgcctaatacatgcaagtcgagcgagaaacttcaaaatgaatcttcggaggacttttgaagcggaaagcggcggacgggtgagtaacgcgtaggcaacctgccctttgcacagggatagccaccggaaacggtgattaatacctgataacacatgagcttcgcatggagcatatgtcaaagatttatc

SEQ ID NO: 3728 - DNA, 225 bp, Unknown
  bacterial strain Ascusb_5859 encodes 16S rRNA
agagtttgatcctggctcaggatgaacgctagctacaggcttaacacatgcaagtcgaggggcagcatgttgtgtgcttgcacacaatgatggcgaccggcgcacgggtgagtaacgcgtatccaacctggccctcagtagggaatagcccggcgaaagtcggattaatgccctatgttctcctttgcgggcatctaatgaggaggaaagatttatcgctggggg

SEQ ID NO: 3729 - DNA, 225 bp, Unknown
  bacterial strain Ascusb_5764 encodes 16S rRNA
agagtttgatcatggctcaggacgaacgctggcggcgtgcctaacacatgcaagtcgagcggtccgcaaggatagcggcgaacgggtgagtaacgcgtaagcaatctgccccgcatattgggatagccgtgccaacgcgcggataataccgaataacgtggccccggacatccggggttgacgaaagattcatcgatgcgggatgagcttgcgtccgattagcta

SEQ ID NO: 3730 - DNA, 225 bp, Unknown
  bacterial strain Ascusb_14570 encodes 16S rRNA
agagtttgatcctggctcaggatgaacgctggcggcatgcctaagacatgcaagtcgtacgagaaggcccactgaaattaatcgaaattggagtgcttgcacaaagatggactttggtggatgtggaatttccttcgagtggcaaacgggtgagtaacacgtgggttacctacctctaagacggggataccaattggaaacgattgttaataccggatgtgttct

SEQ ID NO: 3731 - DNA, 225 bp, Unknown
  bacterial strain Ascusb_4270 encodes 16S rRNA
agagtttgatcatggctcaggatgaacgctagctacaggcttaacacatgcaagtcgaggggcagcatgagggtagcaatacccttgatggcgaccggcgcacgggtgcgtaacacgtatccaatctacccatggctctgggatagcctttcgaaagaaagattaataccggatggtctcacctaaagacatcttttagtgagtaaagatttatcggcgatggat

SEQ ID NO: 3732 - DNA, 225 bp, Unknown
  bacterial strain Ascusb_16891 encodes 16S rRNA
agagtttgatcctggctcaggatgaacgctagcggcaggcttaacacatgcaagtcgaggggcagcaggcggtagcaataccgtgctggcgaccggcgcacgggtgcgtaacgcgtatgcaacttacccactacagggggataacggagggaaacttccactaatatcccatggagttgttttttcgcatggagagacaactaaagctacggtggtagtggatgg

SEQ ID NO: 3733 - DNA, 225 bp, Unknown
  bacterial strain Ascusb_385 encodes 16S rRNA
agagtttgatcatggctcaggatgaacgctggcggcgtgcttaacacatgcaagtcgaacggagttaacgaggagcttgctcctttttaacttagtggcggacgggtgagtaacgcgtgggtaatctgcctcatacagggggataacagttagaaatgactgctaacaccgcataacatagcggaaccgcatgattctgctatcaaatatttataggtatgagat

SEQ ID NO: 3734 - DNA, 225 bp, Unknown
  bacterial strain Ascusb_5244 encodes 16S rRNA
agagtttgatcatggctcaggataaacgctggcggcgtgcataacacattcaagtcgaacgaagcactttcgaacgagacttcggtcaagtttggatttgacttagtggcggacgggtgagtaacgcgtgagcaatctgccttggggtgcgggataacgtcgggaaactgacgctaataccgcatgacgcacggacatcgcatggtgaccgtgccaaagatatat

SEQ ID NO: 3735 - DNA, 225 bp, Unknown
  bacterial strain Ascusb_4385 encodes 16S rRNA
agagtttgatcatggctcaggatgaacgctagcgacaggcctaacacatgcaagtcgagcggcagcacctcgggtggcgagcggcgcacgggtgagtaacgcgtatgtaacctgcccatgagtgggggatagcccggtgaaaaccggattaataccgcataataccgatatatgacatcttagattggttaaagattcattgctcatggatggacatgcgttgga

SEQ ID NO: 3736 - DNA, 225 bp, Unknown
  bacterial strain Ascusb_3447 encodes 16S rRNA
agagtttgatcatggctcagattgaacgctggcggcaggcttaatacatgcaagtcgaacggtagcagcaggaaagcttgcttttctggctgacgagtggcggacgggtgagtaatacctgggaaactgcctataagagggggacaacacctggaaacgggtgctaataccgcataaaccctgaggggaaaaggatgggaaaccatgcgcttatagatgtgccca

SEQ ID NO: 3737 - DNA, 225 bp, Unknown
  bacterial strain Ascusb_2580 encodes 16S rRNA
agagtttgatcctggctcaggatgaacgctggcggcgtgcttaacacatgcaagtcgaacggaacttttctcccgatgaagcggagtgcttgcacaaagtggaatcatttgaaaagtttagtggcggacgggtgagtaacgcgtgggtaacctgccatatacagggggataacacttagaaataggtgctaataccgcataagcgcacggagtcgcatgaccctg

SEQ ID NO: 3738 - DNA, 225 bp, Unknown
  bacterial strain Ascusb_3271 encodes 16S rRNA
agagtttgatcatggctcaggatgaacgctggcggcgtgcttaacacatgcaagtcgaacggagctgttccggacgcctagggcttcggccacgggcagaagggacaacttagtggcggacgggtgagtaacgcgtgggcaacctgcctttttccgggggataacacagggaaacctgtgctaataccgcataaagtcatctgaggacatcctctaatgaccaaa

SEQ ID NO: 3739 - DNA, 225 bp, Unknown
  bacterial strain Ascusb_2316 encodes 16S rRNA
agagtttgatcatggctcaggatgaacgctggcggcgtgtttaacacatgcaagtcgagcgagaagcttctcagtggattcttcggatgacacagagttgcggaaagcggcggacgggtgagtaacgcgtaggcaacctgccccctgcagagggatagcctcgggaaaccgggattaaaacctcataatgcggaaccgggacatcccggatccgccaaagattta

SEQ ID NO: 3740 - DNA, 225 bp, Unknown
  bacterial strain Ascusb_2656 encodes 16S rRNA
agagtttgatcatggctcaggatgaacgctggcggcgtgcctaacacatgcaagtcgagcgagaagctcatgaccaatacttcggttgcgtgattgagtggaaagcggcggacgggtgagtaacgcgtaggcaacctgccccttgcagagggatagcctcgggaaaccgggattaaaacctcataatgtgtctgtgagacatctcatagacgccaaagatttatc

SEQ ID NO: 3741 - DNA, 225 bp, Unknown
  bacterial strain Ascusb_17545 encodes 16S rRNA
agagtttgatcctggctcaggatgaacgctggcggcatgcctaagacatgcaagtcgtacgagatgtccttttgaaatggagtgcttgcacaaagtggataaagatttcatctagtggcgcaagggtgagtaacacgtgggttatctgccttgaagactggaataacagctggaaacggttgctaatgccggatgatatataagatgatacgtcttcttatagta

SEQ ID NO: 3742 - DNA, 225 bp, Unknown
  bacterial strain Ascusb_3353 encodes 16S rRNA
agagtttgatcctggctcaggacgaacgctggcggcgtgcctaacacatgcaagtcgaacggaactgttatgattgattcttcggatgattgaatttcagtttagtggcggacgggtgagtaacgcgtgagtaacctgccttcgagaggggaataacgttctgaaaagatcgctaataccgcataacatagtgatgtcgcatggcaatgctatcaaagattttat

SEQ ID NO: 3743 - DNA, 225 bp, Unknown
  bacterial strain Ascusb_528 encodes 16S rRNA
agagtttgatcatggctcaggatgaacgctggcggcgtgtttaacacatgcaagtcgagcgagatgtttctcagtagattcttcggatgatacagagttacggaaagcggcggacgggtgagtaacgcgtaggcaacctgccccttgcagagggatagcctcgggaaaccgggattaaaacctcataatgcggcactgagacatctcagagccgccaaagattta

SEQ ID NO: 3744 - DNA, 225 bp, Unknown
  bacterial strain Ascusb_5015 encodes 16S rRNA
agagtttgatcctggctcaggacgaacgctggcggcgtgcttaacacatgcaagtcgaacgaggttattttgatgagatcttcggatggattcggaataaccgagtggcggacgggtgagtaacgcgtgagcaacctgtcttacacagggggataacgctccgaaaggagtgctaataccgcataggaccacggtgctgcatggcattgaggtgaaaggagcaat

SEQ ID NO: 3745 - DNA, 225 bp, Unknown
  bacterial strain Ascusb_3978 encodes 16S rRNA
agagtttgatcatggctcaggatgaacgctagcgacaggcctaacacatgcaagtcgaggggcagcgcggaaatagtttactagttctggcggcgaccggcgcacgggtgcgtaacaggtgtgcaatctgtccatagtcggggaatagcccaccgaaaggtgaattaatgctccatgtgagtgaaagccgcatgacttttacttaaaacgtaaggactatgggtg

SEQ ID NO: 3746 - DNA, 225 bp, Unknown
  bacterial strain Ascusb_7684 encodes 16S rRNA
agagtttgatcctggctcaggatgaacgctagcggcaggcttaacacatgcaagtcgaggggcatcgcgggtagcaatacctggcggcgaccggcgaaagggtgagtaacgcgtgagcaacatgcccgtatgtgggggatagtcgatggaaacgtcgcgtaataccccgtaacataagttctcgcatggggatttattgaaagattaattgcatacggattggct

SEQ ID NO: 3747 - DNA, 225 bp, Unknown
  bacterial strain Ascusb_2187 encodes 16S rRNA
agagtttgatcatggctcaggatgaacgctggcggcgtgcctaacacatgcaagtcgagcgagatgctgttgaacagagattcgtcaacgggattcagcggaaagcggcggacgggtgagtaacgcgtaggcaacctgccccttacacagggatagccattggaaacgatgattaaaacctgatgacaccaagagatgacatctttttttggtcaaagatttatc

SEQ ID NO: 3748 - DNA, 225 bp, Unknown
  bacterial strain Ascusb_2009 encodes 16S rRNA
agagtttgatcatggctcaggatgaacgctggcggcgtgcctaacacatgcaagtcgaacgaagcactgcggatagaggcttcggccaattgaagctttgacttagtggcggacgggtgagtaacacgtgagcaacctgcccttcagtgggggacaacagctggaaacggctgctaataccgcataatgtatattggaggcatctccggtataccaaagatttat

SEQ ID NO: 3749 - DNA, 225 bp, Unknown
  bacterial strain Ascusb_9333 encodes 16S rRNA
agagtttgatcatggctcaggatgaacgctggcggcgtgcctaacacatgcaagtcgaacggagatttaacgctgatgaggcttcggcggattcttgttaaatcttagtggcggacgggtgagtaacgcgtgggcaacctgcctcgtactgggggataacagttggaaacgactgttaataccgcataagcgcacggtgtcgcatgacacagtgtgaaaaactcc

SEQ ID NO: 3750 - DNA, 225 bp, Unknown
  bacterial strain Ascusb_500 encodes 16S rRNA
agagtttgatcatggctcaggatgaacgctggcggcgtgcttaacacatgcaagtcgaacgaagcactgggaatgaagttttcggacagatttccctttgacttagtggcggacgggtgagtaacgcgtgggcaacctgccgtatgcagggggacaacagttggaaacggctgctaataccgcataagcgcacggtaccgcatggtacagtgtgaaaagatttat

SEQ ID NO: 3751 - DNA, 225 bp, Unknown
  bacterial strain Ascusb_1100 encodes 16S rRNA
agagtttgatcatggctcaggatgaacgctggcggcgtgcttaacacatgcaagtcgaacgaagcacttaagatgatttcttcggattgaattttttgtgacttagtggcggacgggtgagtaacgcgtgggcaacctgcctctgtctgggggataacagttagaaatgactgctaataccgcataagcgcacatttccgcatggaagagtgtgaaaaacgttag

SEQ ID NO: 3752 - DNA, 225 bp, Unknown
  bacterial strain Ascusb_2057 encodes 16S rRNA
agagtttgatcatggctcaggatgaacgctggcggcgtgcttaacacatgcaagtcgaacgggcttattttggaagcttgcttttgagataagttagtggcggacgggtgagtaacgcgtgggtaacctaccctgtgcagggggatagcagctggaaacggctgataaaaccgcataacacggcgatgccgcatggcaatgccgtcaaatatttataggcacagg

SEQ ID NO: 3753 - DNA, 225 bp, Unknown
  bacterial strain Ascusb_7292 encodes 16S rRNA
agagtttgatcatggctcaggatgaacgctagctacaggcttaacacatgcaagtcgaggggcagcatgtcggttgcttgcaaccgatgatggcgaccggcgcacgggtgagtaacgcgtatccaaccttccctgcagtaaggaacagcccggcgaaagtcggattaatgccttatgttctccgaagcgggcatctaactcggaggaaagatttatcgctgcagg

SEQ ID NO: 3754 - DNA, 225 bp, Unknown
  bacterial strain Ascusb_1676 encodes 16S rRNA
agagtttgatcatggctcaggacgaacgctggcggcgtgcttaacacatgcaagtcgaacgaggttaatgtgaggaagtcttcggatggaatcgtgttaaccgagtggcggacgggtgagtaacgcgtgagcaacctgtcttctacagggggataacactccgaaaggagcgctaataccgcataagaccacggtttcgcatgggactgaggtcaaaggagcaat

SEQ ID NO: 3755 - DNA, 225 bp, Unknown
  bacterial strain Ascusb_3318 encodes 16S rRNA
agagtttgatcatggctcaggatgaacgctagctacaggcttaacacatgcaagtcgaggggcatcatgacgatagcttgctattgttgatggcgaccggcgcacgggtgagtaacgcgtatccaaccttccccttagtagggcatagcccggcgaaagtcggattaataccctatgttattcgtagaggacatctgaaatgaatcaaagattaatcgctaaggg

SEQ ID NO: 3756 - DNA, 225 bp, Unknown
  bacterial strain Ascusb_2148 encodes 16S rRNA
agagtttgatcatggctcaggatgaacgctagctacaggcttaacacatgcaagtcgaggggcagcatggtcaaagcttgctttgactgatggcgaccggcgcacgggtgagtaacgcgtatccaaccttccccttagtagggcatagcccggtgaaaatcggattaataccctatgttgttttctgcagacatctaatgaaaaccaaagattcatcgctaaggg

SEQ ID NO: 3757 - DNA, 225 bp, Unknown
  bacterial strain Ascusb_3121 encodes 16S rRNA
agagtttgatcctggctcaggatgaacgctagctacaggcttaacacatgcaagtcgaggggcagcgggaagttagcttgctaactttgccggcgaccggcgcacgggtgagtaacgcgtatccaaccttccccttagtagggcatagcccgtagaaatgcggattaataccctatgttgtatattgatgacatctgatttataccaaaggttcaccgctaaggg

SEQ ID NO: 3758 - DNA, 225 bp, Unknown
  bacterial strain Ascusb_20193 encodes 16S rRNA
agagtttgatcatggctcaggatgaacgctggcggcatgcctaagacatgcaagtcgtacgaggttgcctgttgaagtttggtgcttgcattaaacggattcagatcacaacctagtggcgaaagggtgagtaacacgtgagttatctacctcagagactggaataactattggaaacgatagctaatgccggatgatatatacaatgatacgttattgtatagt

SEQ ID NO: 3759 - DNA, 225 bp, Unknown
  bacterial strain Ascusb_9153 encodes 16S rRNA
agagtttgatcctggctcaggacaaacgctggcggcgtgcctaacacatgcaagtcgaacggagtataggccttcgggcttatacttagtggcggacgggtgagtaacgcgtgagcaacctgcccttcagtgggggacaacagctggaaacggctgctaataccgcataacgtaccggggtggcatcattccggtaccaaagatttattgctgaaggatgggctc

SEQ ID NO: 3760 - DNA, 225 bp, Unknown
  bacterial strain Ascusb_314 encodes 16S rRNA
agagtttgatcatggctcaggatgaacgctggcggcgtgtttaacacatgcaagtcgagcgagaagctcatgacagatacttcggttgatggattgagtggaaagcggcggacgggtgagtaacgcgtaggcaacctgccccgtgcagagggatagcctcgggaaaccgggattaaaacctcataatgcgcaaccgagacatctcggatgcgccaaagatttatc

SEQ ID NO: 3761 - DNA, 225 bp, Unknown
  bacterial strain Ascusb_239 encodes 16S rRNA
agagtttgatcatggctcaggatgaacgctggcggcgtgcttaacacatgcaagtcgaacgaggttattacagcggaagttttcggatggaagcagttttaaccgagtggcggacgggtgagtaacgcgtgggaaacctgccctattccgggggataccagttggaaacgactgttaataccgcataagcgcacggtgccgcatggtacagtgtgaaaaactccg

SEQ ID NO: 3762 - DNA, 225 bp, Unknown
  bacterial strain Ascusb_1777 encodes 16S rRNA
agagtttgatcatggctcaggatgaacgctggcggcgtgcttaacacatgcaagtcgaacggaacagaagttttcggatttctgtttagtggcggacgggtgagtaacgcgtgggtaacctgcctcgaactgggggataacggttggaaacgaccgctaataccgcataagcccacagtaccgcatggtacagagggaaaagatttatcggtttgagatggaccc

SEQ ID NO: 3763 - DNA, 225 bp, Unknown
  bacterial strain Ascusb_110 encodes 16S rRNA
agagtttgatcatggctcaggatgaacgctggcggcgtgcttaacacatgcaagtcgaacgagcacttcggtgcgagtggcggacgggtgagtaacgcgtgggtaacctgccctatacaggggaataacagagagaaatctctgctaatgccgcataagcgcacggcactgcatggtgctgtgtgaaaagctccggcggtataggatggacccgcgtctgattag

SEQ ID NO: 3764 - DNA, 225 bp, Unknown; identical to SEQ ID NO: 3326
  bacterial strain Ascusb_14965 encodes 16S rRNA

SEQ ID NO: 3765 - DNA, 225 bp, Unknown
  bacterial strain Ascusb_3757 encodes 16S rRNA
agagtttgatcatggctcagaacgaacgctggtggcgtgtcttatacatgcaagtcgagcgaggcagcaatgccgagcggcgaacgggtgagtaacgcgtaagcaatctgccccatatcaggaaatacccgtgccaacgcgcggttaatgtccaggagagtggccctccgcatggagggctgactagagatttatcggtatgggatgagcttgcgtccgattagc

SEQ ID NO: 3766 - DNA, 225 bp, Unknown
  bacterial strain Ascusb_1880 encodes 16S rRNA
agagtttgatcctggctcagagttaacgctggcatcgtgcataacacatgcaagtcgaacgggactttgcgctgtagcaatacagtgtaaagtttagtggcagacgggtgagtaatgtatgggaaatctaccttcgagtggggaataacggcccgaaagggttgctaataccccataacatttctaggtggcatcaccaagaaatcaaagatttatcgcttgaag

SEQ ID NO: 3767 - DNA, 225 bp, Unknown
  bacterial strain Ascusb_1368 encodes 16S rRNA
agagtttgatcatggctcaggatgaacgctagctacaggcttaacacatgcaagtcgaggggcagcatgatcgaagcttgctttgattgatggcgaccggcgcacgggtgagtaacgcgtatccaaccttccctatagtagaggatagcccggcgaaagtcggattaatactctatgttttccaatgcagacatctaagttggaacaaaggttcaccgctatagg

SEQ ID NO: 3768 - DNA, 225 bp, Unknown
  bacterial strain Ascusb_213 encodes 16S rRNA
agagtttgatcatggctcaggatgaacgctggcggcgtgcttaacacatgcaagtcgaacggagtatgttaaccgagaccttcgggtctcacctgatatacttagtggcggacgggtgagtaacgcgtgagcaaccaaccttatgcagagggataacaattagaaatgattgctaatacctcataagaccacgctatcgcatggtaaagtgggaaaaactccggt

SEQ ID NO: 3769 - DNA, 225 bp, Unknown
  bacterial strain Ascusb_1890 encodes 16S rRNA
agagtttgatcatggctcaggacgaacgctggcggcgtgcctaacacatgcaagtcgagcggagacacgggacttcggttctgtgtttcagcggcggacgggtgagtaacgcgtgagcaatctgtcccattcaccgggataacaactggaaacagttgctaataccgggcgagaccacagcaccgcatggtggaggggtagaagggataccggagtggggtgagc

SEQ ID NO: 3770 - DNA, 225 bp, Unknown
  bacterial strain Ascusb_2370 encodes 16S rRNA
agagtttgatcctggctcaggatgaacgctggcggcgtgcctaacacatgcaagtcgaacggagtatatgcgctgatgatcgaagtgcttgcatagagagaatcttgcatatacttagtggcggacgggtgagtaacgtgtggataacctggtccatccagggggatagcagctggaaacggctggtaataccgcataagcgcacagcagggcatcctgcggtgt

SEQ ID NO: 3771 - DNA, 225 bp, Unknown
  bacterial strain Ascusb_7352 encodes 16S rRNA
agagtttgatcctggctcaggatgaacgctagctacaggcttaacacatgcaagtcgaggggcagcgggaaggaagcttgctttctttgccggcgaccggcgcacgggtgagtaacgcgtatccaacctgcccgcggctcagggatagcctcgtgaaaacgagattaatacctgatggtcttggatgctgacatcggtttccaagtaaagatttatcggcagcgg

SEQ ID NO: 3772 - DNA, 225 bp, Unknown
  bacterial strain Ascusb_17795 encodes 16S rRNA
agagtttgatcctggctcaggatgaacgctggcggcatgcctaagacatgcaagtcgaacgaggtggcccattgaaggatgcgtgcttgcacaaatctggatttggattcccacctagtggcagacgggtgagtaacacgtgggtgacctacctttaagctggggataacagttagaaatgattgctaataccgaataagatataggagtcaatcttatattgaa

SEQ ID NO: 3773 - DNA, 225 bp, Unknown
  bacterial strain Ascusb_10700 encodes 16S rRNA
agagtttgatcctggctcaggatgaacgctagctacaggcttaacacatgcaagtcgaggggcagcatggaggttgcttgcaacttctgatggcgaccggcgcacgggtgagtaacgcgtatccaaccttccccctagtagggtccagcccggcgaaagtcggattaataccctatgttcttcaatgatgacatcaggattgaagcaaagattcatcgctagtgg

SEQ ID NO: 3774 - DNA, 225 bp, Unknown
  bacterial strain Ascusb_9020 encodes 16S rRNA
agagtttgatcatggctcaggatgaacgctagctacaggcttaacacatgcaagtcgaggggcagcatggagtttgcttgcaaactctgatggcgaccggcgaatgggtgagtaacgcgtatccaacctgccctgtgcccgggaatagcccttggaaacgaggattaacgcccgatggcgtgcgatgaccgcatgggaaatgcactaaatggaaaggcacgggat

SEQ ID NO: 3775 - DNA, 225 bp, Unknown
  bacterial strain Ascusb_529 encodes 16S rRNA
agagtttgatcatggctcaggatgaacgctggcggcgcgcctaacacatgcaagtcgaacggttaaagcacctccgggtgtgtataaagtggcgaacggctgagtaacacgtgggcaacctgcccctcgctccgggacagcctcgggaaactgggagtaataccggatactccgccacccccgcatgggggaggcgggaaagctccgacggcgagggatgggccc

SEQ ID NO: 3776 - DNA, 225 bp, Unknown
  bacterial strain Ascusb_19742 encodes 16S rRNA
agagtttgatcctggctcaggatgaacgctagctacaggcttaacacatgcaagtcgaggggcagcgagaaggaagcttgctttctttgtcggcgaccggcgcacgggtgagtaacgcgtatccaaccttccccttagtagggcatagcccgtagaaatgcggattaataccctatgttattcgtcgaggacatctgaagtgaatcaaaggtttaccgctaaggg

SEQ ID NO: 3777 - DNA, 225 bp, Unknown
  bacterial strain Ascusb_15723 encodes 16S rRNA
agagtttgatcctggctcaggatgaacgctagctacaggcttaacacatgcaagtcgaggggcagcatgaaggaagcttgcttcctttgatggcgaccggcgcacgggtgagtaacgcgtatccaaccttccccctagcagggcatagcccgtagaaatgcggattaacaccctatgttgtgttttgaggacatctgacgaacactaaaggcttgacgctagggg

SEQ ID NO: 3778 - DNA, 225 bp, Unknown
  bacterial strain Ascusb_9379 encodes 16S rRNA
agagtttgatcctggctcaggatgaacgctagcgacaggcctaacacatgcaagtcgaggggcagcgcgggagaagcttgcttttcctggcggcgaccggcgcacgggtgcgtaacaggtgtgcaatctgtccatagtcggggaatagcccagcgaaagttggattaatgctccatgtgaagagaagccgcatgacttttctttgaaacgtaaggactatgggtg

SEQ ID NO: 3779 - DNA, 225 bp, Unknown
  bacterial strain Ascusb_13361 encodes 16S rRNA
agagtttgatcatggctcaggatgaacgctggcggcatgcctaagacatgcaagtcgtacgagacgaccctttgaaatggagtgcttgcacaaagtggattaggattttcgtctagtggcgcaagggtgagtaacacgtgggtaatctgccttggagactggaataacaattagaaatgattgctaatgccggatgatatataaaaggatacgttcttttatagt

SEQ ID NO: 3780 - DNA, 225 bp, Unknown
  bacterial strain Ascusb_11373 encodes 16S rRNA
agagtttgatcatggctcaggacgaacgctggcggcgtgcctaacacatgcaagtcgaacggacgaggggagcttgctccccaagttagtggcggacgggtgagtaacacgtgagcaacctgcccttcggagggggacaacagcgggaaactgctgctaataccgcataacgtatcctggaggcatctccgggataccaaagattttatcgccgaaggatgggct

SEQ ID NO: 3781 - DNA, 225 bp, Unknown
  bacterial strain Ascusb_6130 encodes 16S rRNA
agagtttgatcctggctcaggatgaacgctagctacaggcttaacacatgcaagtcgaggggtaacatgattggagcttgctccgattgatgacgaccggcgcacgggtgagtaacgcgtatccaacctgccccatgctctgggataaccttccgaaagggagcctaataccggatgttgtgcgacgatggcatcagaattgcacgaaagattcatcggcatggg

SEQ ID NO: 3782 - DNA, 225 bp, Unknown
  bacterial strain Ascusb_1454 encodes 16S rRNA
agagtttgatcctggctcaggacgaacgctggcggcatgcctaacacatgcaagtcgaacggagcagttccttcggggactacttagtggcgaacgggtgagtaacgcgtgagcaacctgcctcggcgagggggataacacttggaaacaggtgctaataccgcataagaccacactgtcgcatgacagaggggtcaaaggagcaatccgcgctgagaggggctc

SEQ ID NO: 3783 - DNA, 225 bp, Unknown
  bacterial strain Ascusb_1059 encodes 16S rRNA
agagtttgatcatggctcaggatgaacgctagcggcaggcttaacacatgcaagtcgaggggcagcggggagtagcaatactctgccggcgaccggcgaaagggtgcgtaacgcgtgagcaacttgcccgtatctgggacataagcgatggaaacgccgtctaatttcccataacaacagaggccgcatgacctttgtttgaaagatccgtcggatacggatggg

SEQ ID NO: 3784 - DNA, 225 bp, Unknown
  bacterial strain Ascusb_5317 encodes 16S rRNA
agagtttgatcctggctcagaacgaacgctggcggcgcgttttaagcatgcaagtcgagcggcagcagcaatgcgagagcggcggacgggtgagtaacacgtgggtaatctgccctccggtcgggaatagcctgtggaaacacaggataataccggatgcgatggtcctcacacaagtgagggtcaggaaaggagccaaggctccgccggaggatgagcccgcgt

SEQ ID NO: 3785 - DNA, 225 bp, Unknown
  bacterial strain Ascusb_1629 encodes 16S rRNA
agagtttgatcatggctcaggatgaacgctggcggcgtgcctaacacatgcaagtcgaacggagatcttatggacagaggcttcggccaaaggaagtttgatcttagtggcggacgggtgagtaacgcgtggggaacctgccccataccgggggataacagatagaaatgtctgctaataccgcataagcgcacgaggtcgcatgaccctgtgtgaaaaactccg

SEQ ID NO: 3786 - DNA, 225 bp, Unknown
  bacterial strain Ascusb_1590 encodes 16S rRNA
agagtttgatcatggctcaggacgaacgctggcggcgtgcctaacacatgcaagtcgaacggggttcttgcggaagtccttcggggcggaagcttgaacttagtggcgaacgggtgagtaacgcgtgagcaacctgcctttcagagggggacaacagttggaaacgactgctaataccgcatgacacattgagaccgcatgattttaatgtcaaagatttatcgc

SEQ ID NO: 3787 - DNA, 225 bp, Unknown
  bacterial strain Ascusb_5667 encodes 16S rRNA
agagtttgatcatggctcaggataaacgctggcggcgtgcctaatacatgcaagtcgtacgctggaagaccaagcttgcttggtttgaaggagtggcgaacgggtgagtaatacataagcaacctgcccacgaagactgggataattcttggaaacgaggactaataccggataggtcatcgggaggcatcttctgatgattaaaggtgagaaacactggtggat

SEQ ID NO: 3788 - DNA, 225 bp, Unknown
  bacterial strain Ascusb_4163 encodes 16S rRNA
agagtttgatcatggctcaggatgaacgctagctacaggcttaacacatgcaagtcgaggggcagcgggagagtagcttgctactcttgccggcgaccggcgcacgggtgcgtaacgcgtatccaacctgccgtgtacttggggatagccctctgaaaggaggattaatacccgatgtggtcatttgaagacatcttcttatgattaaagatttatcggtacacc

SEQ ID NO: 3789 - DNA, 225 bp, Unknown
  bacterial strain Ascusb_6066 encodes 16S rRNA
agagtttgatcatggctcaggatgaacgctagctacaggcttaacacatgcaagtcgaggggcagcatagggtttgcttgcaaactctgatggcgaccggcgcacgggtgagtaacgcgtatccaacctgcccacggccagggaatagcccgctgaaaagcggattaatgccctatggcgtcctttgaaggcatctgacggggactaaagctttggcggccgtgg

SEQ ID NO: 3790 - DNA, 225 bp, Unknown
  bacterial strain Ascusb_4983 encodes 16S rRNA
agagtttgatcctggctcaggatgaacgctggcggcgtgcttaacacatgcaagttgaacgaaggtatcggatgaggcttcggcggattctgatatacttagtagcggacgggtgagtaacgcgtgggcaacctgccctgtacagggggacaacagctggaaacggctgctaataccgcataagcgcacagcaccgcatggtgccgtgtgaaaagcgcaacggta

SEQ ID NO: 3791 - DNA, 225 bp, Unknown
  bacterial strain Ascusb_511 encodes 16S rRNA
agagtttgatcatggctcaggatgaacgctggcggcgtgcttaacacatgcaagtcgaacgggaattactttttagcttgctaagttgtaattctagtggcggacgggtgagtaacgcgtgggtaacctgccttataccgggggacaacagttggaaacggctgctaataccgcataagcgcacagtttcgcatgaaacagtgtgaaaaactccggtggtataag

SEQ ID NO: 3792 - DNA, 225 bp, Unknown
  bacterial strain Ascusb_3124 encodes 16S rRNA
agagtttgatcatggctcaggatgaacgctggcggcgtgcttaacacatgcaagtcgaacggagaacattcgctgaagcgagcttgctcaattcttgaatgttcttagtggcggacgggtgagtaacgcgtgggtaacctgcccattaccgggggacaacagttggaaacggctgctaataccgcataagcgcacagtttcgcatgaaacggtgtgaaaaactcc

SEQ ID NO: 3793 - DNA, 225 bp, Unknown
  bacterial strain Ascusb_7360 encodes 16S rRNA
agagtttgatcatggctcaggatgaacgctggcggcgtgcctaacacatgcaagtcgaacgaagcatacgggacggagattcgtcgaagccctgtatgacttagtggcggacgggtgagtaatgtatgagcaacctgcctttcagagggggacaacagttggaaacgactgctaataccgcataatgtatttgggtggcatcacctggataccaaaggagcaatc

SEQ ID NO: 3794 - DNA, 225 bp, Unknown
  bacterial strain Ascusb_4344 encodes 16S rRNA
agagtttgatcatggctcaggatgaacgctagcggcaggcttaacacatgcaagtcgaggggcagcgcgggagtagcaatacttctggcggcgaccggcgcaagggtgcgtaacgcgtgagcgacatgcccgtgaccgggggataaccgatggaaacgtcgcctaaccccccatacgatcatacaccgcatggtgtctgattgaaaaccctggtggtcacggatt

SEQ ID NO: 3795 - DNA, 225 bp, Unknown
  bacterial strain Ascusb_9952 encodes 16S rRNA
agagtttgatcctggctcaggatgaacgctggcggcgtgcttaacacatgcaagttgtgcggtttcttttgaatgagacttcggtggattttggaagagatagcagcggacgggtgagtaaagcacaaggacgtgccctgaggcgggggacaactacgggaaaccgtagctaataccccgtaagccgagaggtgaaagcagcaatgcgccgaaggagcgacttgt

SEQ ID NO: 3796 - DNA, 225 bp, Unknown
  bacterial strain Ascusb_1902 encodes 16S rRNA
agagtttgatcatggctcaggatgaacgctagcggcaggcttaacacatgcaagtcgaggggtaacagggagtagcaatactctgctgacgaccggcgcacgggtgcgtaacgcgtatgcaacctaccctgtacagggggataacggagagaaatttccactaatatcccatggtgtcggagaaccgcatggttttcggactaaagcttcggtggtacaggacgg

SEQ ID NO: 3797 - DNA, 225 bp, Unknown
  bacterial strain Ascusb_10919 encodes 16S rRNA
agatttgatcatggctcagattgaacgctggcggcaggcctaatacatgcaagtcgaacggtaacatggaagtagcaatacttttgatgacgagtggcggacgggtgagtaatatttgggaatctacctatcagagggggatagcaactggaaacggttgataagaccgcgtacgctctgaggaggaaagtaatgggatcgaaagaccattagctgatagatgag

SEQ ID NO: 3798 - DNA, 225 bp, Unknown
  bacterial strain Ascusb_1788 encodes 16S rRNA
agagtttgatcatggctcaggatgaacgctggcggcgtgcttaatacatgcaagtcgaacgaagcactttcagcagatcccttcggggtgaagccggttgtgacttagtggcggacgggtgagtaacgcgtgggtaacctgccttatacagggggataacagctggaaacgactgctaataccccataagcgcacggcaccgcatgatgcagtgtgaaaagattt

SEQ ID NO: 3799 - DNA, 225 bp, Unknown
  bacterial strain Ascusb_3081 encodes 16S rRNA
agagtttgatcatggctcaggacgaacgctggcggcgtgcctaacacatgcaagtcgaacggagcgaaagcagcttgctgctggagcttagtggcggacgggtgagtaacacgtgagcaacctgcctttcagaggggaataatgtttggaaacggacactaataccgcataatatatttttactgcatggtaagagatatcaaaggagcaatccgctgaaagatg

SEQ ID NO: 3800 - DNA, 225 bp, Unknown
  bacterial strain Ascusb_5791 encodes 16S rRNA
agagtttgatcatggctcaggatgaacgctagctacaggcttaacacatgcaagtcgaggggcatcagggagaaagcttgctttctttgctggcgaccggcgcacgggtgagtaacgcgtatccaaccttccccccagtagggcatagcccggcgaaagtcggattaataccctatgttcttcgtagaggacatctgaaatgaagcaaaggtttaccgctagggg

SEQ ID NO: 3801 - DNA, 225 bp, Unknown
  bacterial strain Ascusb_2209 encodes 16S rRNA
agagtttgatcctggctcaggatgaacgctagctacaggcttaacacatgcaagtcgaggggcagcagggaggaagcttgctttctttgctggcgaccggcgcacgggtgagtaacgcgtatccaaccttccccttagtagaggatagcccggcgaaagtcggattaatactctatgttcttcacatgaggcatcgaacgtgaagcaaaggcttgccgctaaggg

SEQ ID NO: 3802 - DNA, 225 bp, Unknown
  bacterial strain Ascusb_2924 encodes 16S rRNA
agagtttgatcatggctcagaacgaacgctggcggcgcgtcttaagcatgcaagtcgagcggtaagtcgggagcttgctcctgacctagagcggcggactggtgagtaacgcgtgggtgacgtacctttgtgacggggatagctcctagaaataggagataataccggatacgctgcatgttgtcagaggacatgcaggaaaggatcttttgattcgcacagaga

SEQ ID NO: 3803 - DNA, 225 bp, Unknown
  bacterial strain Ascusb_16747 encodes 16S rRNA
agagtttgatcatggctcaggatgaatgctggcggcgtgcctaatacatgcaagtcgagcggtaacagggcttcaccgtttccttgacacacctagcgcatatatcgtaggttggttcgattcgagggaacagtgaagctgctgacgagcggcggacggctgagtaacgcgtgggaacgtaccccaaactgagggataactagtcgaaagattagctaataccgc

SEQ ID NO: 3804 - DNA, 225 bp, Unknown
  bacterial strain Ascusb_19634 encodes 16S rRNA
agagtttgatcatggctcaggatgaacgctggcggcatgcctaagacatgcaagtcgtacgaagtgacccattgaagtggagtgcttgcacaaagcggatttggattttcacttagtggcgcaagggtgagtaacacgtgggttatctgccttggagactggaataacaattagaaatgattgctaatgccggatgatatgtaagaggatacgttctcttatagt

SEQ ID NO: 3805 - DNA, 225 bp, Unknown
  bacterial strain Ascusb_898 encodes 16S rRNA
agagtttgatcatggctcaggacgaacgctggcggcgtgcttcatacatgcaagtcgaacgagaagttaccttcgggtaatggaaagtggcggacgggtgagtaatgtgtagagaatctgccctagagcgggggacaaccgttggaaacgacagctaataccccatatgagcgtagctgagatgctattcttgaaaactccggtgctctgggatgagtctgcatc

SEQ ID NO: 3806 - DNA, 225 bp, Unknown
  bacterial strain Ascusb_4649 encodes 16S rRNA
agagtttgatcctggctcaggatgaacgctagctacaggcttaacacatgcaagtcgaggggcagcatgttggttgcttgcaaccaatgatggcgaccggcgcacgggtgagtaacgcgtatccaacctggcccttagtaggggatagcccggcgaaagtcggattaatgccctatgttcttcaatgcgggcatctaagttgaagcaaagattgatcgctaaggg

SEQ ID NO: 3807 - DNA, 225 bp, Unknown
  bacterial strain Ascusb_16089 encodes 16S rRNA
agagtttgatcctggctcaggatgaacgctggcggcgtgcctaacacatgcaagtcgaacggagattaaacgctgatgaggcttcggcggaatcttgtttaatcttagtggcggacgggtgagtaacgcgtgggcaacctgcctcatactgggggataacagctggaaacgactgttaataccgcataagcgcacagcatcgcatgatgcagtgtgaaaaactct

SEQ ID NO: 3808 - DNA, 225 bp, Unknown
  bacterial strain Ascusb_7155 encodes 16S rRNA
agagtttgatcatggctcaggatgaacgctagctacaggcttaacacatgcaagtcgaggggcatcatggagtttgcttgcaaactctgatggcgaccggcgcacgggtgagtaacgcgtatccaaccttccccctagtagggcatagcccggcgaaagtcggattaacaccctatgttttccaatgaggacatctgagctggaacaaagattcatcgctagggg

SEQ ID NO: 3809 - DNA, 225 bp, Unknown
  bacterial strain Ascusb_4076 encodes 16S rRNA
agagtttgatcatggctcaggatgaacgctggcggcgtgcctaacacatgcaagtcgaacgaagcattgcgcccgacgaagaggagtgcttgcacaaatcggagtcaattgtgatgacttagtggcggacgggtgagtaacgcgtgggtaacctgccttatacagggggataacagttagaaatgactgctaataccgcataagcgcacagcatcgcatgatgca

SEQ ID NO: 3810 - DNA, 225 bp, Unknown
  bacterial strain Ascusb_6157 encodes 16S rRNA
agagtttgatcctggctcaggacgaacgctggcggcgtgcctaacacatgcaagtcgagcggaggttatttgcggaggcttcggccaaaggaaataattctcagcggcggacgggtgagtaacgcgtgagcaacctgtccctcacagggggataagacagcgaaagttgttctaataccgcatgagaccacggtgggacatcccacaggggtcaaaggagcaatc

SEQ ID NO: 3811 - DNA, 225 bp, Unknown
  bacterial strain Ascusb_5204 encodes 16S rRNA
agagtttgatcctggctcaggatgaacgctggcggcgtgcctaacacatgcaagtcgaacgggactgtttagtgacgatttcggtctgatctttacagtttagtggcggacgggtgagtaacgcgtggataacctgcctttcacagggggatagcagctggaaacggctggtaataccgcatacgctctttttaccgcatggtggagagaggaaagatttatcgg

SEQ ID NO: 3812 - DNA, 225 bp, Unknown
  bacterial strain Ascusb_6015 encodes 16S rRNA
agagtttgatcatggctcaggatgaacgctagctacaggcttaacacatgcaagtcgaggggcagcatgatcttagcttgctaagattgatggcgaccggcgcacgggtgagtaacgcgtatccaaccttccccttagtagaggatagcccggcgaaagtcggattaatactctatgttgtttgaagcggacatctaaatcaaaccaaagattttatcgctaagg

SEQ ID NO: 3813 - DNA, 225 bp, Unknown
  bacterial strain Ascusb_434 encodes 16S rRNA
agagtttgatcatggctcaggatgaacgctggcggcacgcttaacacatgcaagtcgagcggaaacggatacttcggtatctgttttagcggcggacgggtgagtaacacgtgggtaacctaccctatacagggggataacgtaaagaaatttacgctaataccgcataagccaacagggaggcatcttctggttggaaaagccgagacggtataggatgggccc

SEQ ID NO: 3814 - DNA, 225 bp, Unknown
  bacterial strain Ascusb_8244 encodes 16S rRNA
agagtttgatcctggctcaggatgaacgctagctacaggcttaacacatgcaagtcgaggggcagcatgaagtttgcttgcaaactttgatggcgaccggcgcacgggtgagtaacgcgtatccaaccttccccttactagggaatagcccggcgaaagtcggattaatgccctatgttctccttcgcgggcatctaacgaggagcaaagattcatcggtaaggg

SEQ ID NO: 3815 - DNA, 225 bp, Unknown
  bacterial strain Ascusb_4286 encodes 16S rRNA
agagtttgatcatggctcaggatgaacgctagcgacaggcctaacacatgcaagtcgaggggcagcgcggaagtagcttgctatttctggcggcgaccggcgcacgggtgcgtaacaggtgtgcaatctgtccatagtcggggaatagcccagcgaaagttggattaaagctccatgtgtcacgaagccgcatgacattgtgatgaaacgtaaggactatgggtg

SEQ ID NO: 3816 - DNA, 225 bp, Unknown
  bacterial strain Ascusb_3946 encodes 16S rRNA
agagtttgatcctggctcaggatgaacgctggcggcgcgcttaacacatgcaagtcgaacggttaaagcacctccgggtgtgcataaagtggcgaacggctgagtaacacgtgggcaacctgccccccgcaccgggatagcctcgggaaaccgtgggtaataccggatactccgccacccccgcatgggggaggcgggaaagcgtacacggcgggggatgggccc

SEQ ID NO: 3817 - DNA, 225 bp, Unknown
  bacterial strain Ascusb_1489 encodes 16S rRNA
agagtttgatcatggctcaggatgaacgctagctacaggcttaacacatgcaagtcgaggggcagcgggaagaaagcttgctttctttgccggcgaccggcgcacgggtgagtaacgcgtatccaacctggcccttagtaggggatagcccggcgaaagtcggattaataccctatgttcttcgtagaagacatctgaaatgaagcaaagatttatcgctaaggg

SEQ ID NO: 3818 - DNA, 225 bp, Unknown
  bacterial strain Ascusb_4840 encodes 16S rRNA
agagtttgatcatggctcaggatgaacgctagctacaggcttaacacatgcaagtcgaggggcagcatgagggtagcaatacctttgatggcgaccggcgcacgggtgcgtaacacgtatccaatctacccatggctcgggaatagcctttcgaaagaaagattaatgcccgatggtctgtgattgagacatctcgattacagtaaagatttatcggcgatggat

SEQ ID NO: 3819 - DNA, 225 bp, Unknown
  bacterial strain Ascusb_2860 encodes 16S rRNA
agagtttgatcctggctcaggatgaacgctagcgacaggcctaacacatgcaagtcgagcggcagcacctcgggtggcgagcggcgcacgggtgagtaacgcgtatgtaacctgcccatgagtgggggatagcccggtgaaaaccggattaataccgcataataccgatatatgacatcttagatcggttaaagattcattgctcatggatggacatgcgttgga

SEQ ID NO: 3820 - DNA, 225 bp, Unknown
  bacterial strain Ascusb_5956 encodes 16S rRNA
agagtttgatcctggctcaggatgaacgctggcggcgtgcctaatacatgcaagtcgaacgagggtgcttgcaccctagtggcgaacgggtgagtaacacgtaggtaacctgccctttagtttgggatacccagaggaaactttggctaataccggatatgaatttaagaggcatctcttgaatttgaaaggagcgtttgctccgctttaggatggacctgcggc

SEQ ID NO: 3821 - DNA, 225 bp, Unknown
  bacterial strain Ascusb_2852 encodes 16S rRNA
agagtttgatcctggctcaggatgaacgctggcggcgtgcctaacacatgcaagtcgagcggagttatatgttgattcttcggatgattcctataacttagcggcggatgggtgagtaacacgtgggtaatctgccctgcactgggggataacagttggaaacgactgttaataccgcatatgcacacggggccgcatggccctgggtggaaagattcatcggtg

SEQ ID NO: 3822 - DNA, 225 bp, Unknown
  bacterial strain Ascusb_8619 encodes 16S rRNA
agagtttgatcatggctcagaacgaacgctggcggcgcgtcttaagcatgcaagtcgaatggcaagatctgtgcttgcacagatcctagaatggcggactggtgagtaacgcgtgggtgacgtacctcttggatggggatagctcctggaaacaggagataataccgaataagctgcatggatttagaggccatgcaggaaagcagcttttgctgcgccgagaga

SEQ ID NO: 3823 - DNA, 225 bp, Unknown
  bacterial strain Ascusb_6373 encodes 16S rRNA
agagtttgatcatggctcaggataaacgctggcaccatgcctaatacatgcatgtcgtacgagagtccttcgggactcgagtggcaaatgggtgagtaacacgtaaggaacttcccctagcgacgaggataacggttggaaacgactgctaatactggatagtacatcggaccgcatgatctgatgtttaaaggcccgtttgggtcacgctaggatggccttgcg

SEQ ID NO: 3824 - DNA, 225 bp, Unknown
  bacterial strain Ascusb_3698 encodes 16S rRNA
agagtttgatcatggctcaggatgaacgctagcggcaggcttaacacatgcaagtcgaggggcagcgcgggtagcaatacctggcggcgaccggcgaaagggtgcggaacacgtgagcaacttgcccgtgacagggggataagcgctggaaacggcgtctaataccccgtaacacaagggatggcatcgtcctttgttgaaagtcttcggatggtcacggatggg

SEQ ID NO: 3825 - DNA, 225 bp, Unknown
  bacterial strain Ascusb_430 encodes 16S rRNA
agagtttgatcctggctcaggatgaacgctagcgacaggcctaacacatgcaagtcgaggggcagcgcggaagtagcttgctatttctggcggcgaccggcgcacgggtgcgtaacaggtgtgcaatctgtccatagtcggggaatagcccagcgaaagctgaattaacactccatgtgtcacgaagccgcatgactttgtgatgaaacgtaaggactatgggtg

SEQ ID NO: 3826 - DNA, 225 bp, Unknown
  bacterial strain Ascusb_21325 encodes 16S rRNA
agagtttgatcctggctcaggatgaacgctagctacaggcttaacacatgcaagtcgaggggcagcatgggagtagcttgctactcttgatggcgaccggcgcacgggtgcgtaacacgtatccaatctacccatggctcgggaatagcctttcgaaagaaagattaatgcccgatggtctgtcagtgagacatctcgcaggcagtaaagattaatcggcgatgg

SEQ ID NO: 3827 - DNA, 225 bp, Unknown
  bacterial strain Ascusb_2404 encodes 16S rRNA
agagtttgatcctggctcaggatgaacgctagcgacaggcctaacacatgcaagtcgagcggcagcacctcgggtggcgagcggcgcacgggtgagtaacgcgtatgtaacctgcccatgagtgggggatagcccggtgaaaaccggattaataccccatgataccattattagacatcttagaatggttaaagattcattgctcatggatggacatgcgttgga

SEQ ID NO: 3828 - DNA, 225 bp, Unknown
  bacterial strain Ascusb_594 encodes 16S rRNA
agagtttgatcatggctcaggatgaacgctagctacaggcttaacacatgcaagtcgaggggtaacattggctgagcttgctcagccagatgacgaccggcgcacgggtgagtaacgcgtatccaacctgcccatgggtcaggaataaccttccgaaagggagcctaatacctgatgcagtgagaagaaggcctctgattttcacgaaagacttcggtcgccgat

SEQ ID NO: 3829 - DNA, 225 bp, Unknown
  bacterial strain Ascusb_1796 encodes 16S rRNA
agagtttgatcctggctcaggatgaacgctggcggcaggcttaatacatgcaagtcgaacggtaaggccgagtgtagcaatacacgaggtacacgagtggcgcacgggtgcgtaacgcgtatgcaacctgcccctgaccgggacaaaacagctggaaacggctgctaatatcccatggttaccgaggagggcatcctcctttgtataaagattcattggtcgggg

SEQ ID NO: 3830 - DNA, 225 bp, Unknown
  bacterial strain Ascusb_4687 encodes 16S rRNA
agagtttgatcctggctcaggatgaacgctggcggcgtgcctaatacatgcaagtcgaacggcagtagcaatactgtagtggcgaacgggtgagtaacacgttggtgacctgccccaaagatgggaatatcacctggaaacgggtggcaaaaccgaataagcttggccgagttagagaaagtcaagtaaaagagcaatctactttgggaggggcctgcggcccat

SEQ ID NO: 3831 - DNA, 225 bp, Unknown
  bacterial strain Ascusb_2672 encodes 16S rRNA
agagtttgatcctggctcagaacgaacgctggcggcgcgtcttaagcatgcaagtcggacggcagggcaccttcgggtgtccgagagtggcgaacgggtgagtaacacgtaagtgatctgccctgcagttggggatagcctgtggaaacacagggtaataccggatgagatgtcaatgattgaactatgacatgaaagtggctatggccacgctgcaggatgagc

SEQ ID NO: 3832 - DNA, 225 bp, Unknown
  bacterial strain Ascusb_814 encodes 16S rRNA
agagtttgatcatggctcaggacgaacgctggcggcgtgcctaacacatgcaagtcgaacggagatatttttgattgagatttcggttgattgaagaaatatcttagtggcggacgggtgagtaacgcgtgagtaacctgcccataagagggggataacgttctgaaaagaacgctaataccgcataacatattcaaatcgcatgatttgaatatcaaaggagca

SEQ ID NO: 3833 - DNA, 225 bp, Unknown
  bacterial strain Ascusb_2328 encodes 16S rRNA
agagtttgatcctggctcaggatgaacgctggcggcgtgcttaacacatgcaagtcgaacgagctgcacggacggaagttttcggatggaagaccgtgtacgcgagtggcggacgggtgagtaacgcgtggggaacctgccctgttccgggggataccagttggaaacgactgttaataccgcataagcgcacggtaccgcatggtacagtgtgaaaaactccgg

SEQ ID NO: 3834 - DNA, 225 bp, Unknown
  bacterial strain Ascusb_2059 encodes 16S rRNA
agagtttgatcctggctcaggatgaacgctggcggcgtgcttaacacatgcaagtcgaacggagccaaaaggaagcttgctttctttgaagcttagtggcggacgggtgagtaacgcgtgagcaacctgcccttcagtggggaataacacagagaaatctgtgctaataccgcataacgtctctttgccgcatgacagagagaccaaaggatttattcgctgaag

SEQ ID NO: 3835 - DNA, 225 bp, Unknown
  bacterial strain Ascusb_3868 encodes 16S rRNA
agagtttgatcctggctcaggatgaacgctagctacaggcttaacacatgcaagtcgaggggcagcatggagtcagcttgctgactttgatggcgaccggcgcacgggtgcgtaacacgtatccaatctacccatggctcgggaatagcctttcgaaagaaagattaatgcccgatggtcttacggagagacatctctctgtaagtaaagatttatcggcgatgg

SEQ ID NO: 3836 - DNA, 225 bp, Unknown
  bacterial strain Ascusb_3913 encodes 16S rRNA
agagtttgatcatggctcaggatgaacgctggcggcgtgcttaacacatgcaagtcgaacgaagcattcagatcggaacttttcggagtgaagaactttatgacttagtggcggacgggtgagtaacgcgtgggcaacctgccttttaccgggggacaacagttggaaacgactgctaataccgcataagcgcacggtaccgcatggtacagtgtgaaaaactcc

SEQ ID NO: 3837 - DNA, 225 bp, Unknown
  bacterial strain Ascusb_1333 encodes 16S rRNA
agagtttgatcatggctcaggatgaacgctggcggcgtgcttaacacatgcaagtcgaacgaagctccttgaactgaagattcgtctgatgggataggaagacttagtggcggacgggtgagtaacgcgtgggtaacctgccgtatacagggggataacagttagaaatgactgctaataccgcataagcgcacagtaaggcatcttacagtgtgaaaaactccg

SEQ ID NO: 3838 - DNA, 225 bp, Unknown
  bacterial strain Ascusb_2463 encodes 16S rRNA
agagtttgatcctggctcaggatgaacgctggcggcgtgcctaacacatgcaagtcgagcgagaagctgttgaacagagattcgtcaacgggatacagcggaaagcggcggacgggtgagtaacgcgtaggcaacctgccccttacacagggatagccattggaaacgatgattaaaacctgatgacaccggaagatgacatcttcatccggtcaaagatttatc

SEQ ID NO: 3839 - DNA, 225 bp, Unknown
  bacterial strain Ascusb_5459 encodes 16S rRNA
agagtttgatcctggctcaggacgaacgctggcggcgtgcttaacacatgcaagtcgaacgaggatatactgaacggagggcttcggttcaaagggaggtatattcgagtggcggacgggtgagtaacgcgtgagcaatctgtcccagacagggggataacacttggaaacaggtgctaataccgcataagaccacagtatcgcatggtacaggggtaaaaggag

SEQ ID NO: 3840 - DNA, 225 bp, Unknown
  bacterial strain Ascusb_429 encodes 16S rRNA
agagtttgatcatggctcaggatgaacgctagctacaggcttaacacatgcaagtcgaggggcagcacggagactgcttgcagtctctggtggcgaccggcggatgggtgagtaacgcgtatccaacctgcccgtgacccggggacagccttccgaaaggaagattaatacccgatgttccggcgtgcgcgcatgcgctgcgccggcaaagtttttctgcggtga

SEQ ID NO: 3841 - DNA, 225 bp, Unknown
  bacterial strain Ascusb_1562 encodes 16S rRNA
agagtttgatcatggctcaggatgaacgctggcggcgtgcttaacacatgcaagtcgaacgagcgagttcccttcggggaatgagcgagtggcggacgggtgagtaacgcgtgggtaacctgcctcatacagggggataacagtcagaaatgactgctaataccgcataagcgcacagtactgcatggtacagtgtgaaaagctccggcggtatgagatggaccc

SEQ ID NO: 3842 - DNA, 225 bp, Unknown
  bacterial strain Ascusb_2906 encodes 16S rRNA
agagtttgatcatggctcaggatgaacgctggcggcgtgcttaacacatgcaagtcgaacggactttagaatgaagcttgcgatttctaaagttagtggcggacgggtgagtaacgcgtgggtaacctgccttataccgggggataacacttagaaataggtgctaataccgcataagcgcacagtttcgcatgaaacagtgtgaaaaactccggtggtataaga

SEQ ID NO: 3843 - DNA, 225 bp, Unknown
  bacterial strain Ascusb_9477 encodes 16S rRNA
agagtttgatcatggctcaggatgaacgctagcggcaggcttaacacatgcaagtcgaggggcagcggggtgtagcaatacactgccggcgaccggcgcacgggtgcgtaacgcgtatgcaacctgccccgcacagggggataacggagagaaatttccactaatatcccatggcgtattgagaccgcatggtcttgatactaaagcttcggtggtgcgggatgg

SEQ ID NO: 3844 - DNA, 225 bp, Unknown
  bacterial strain Ascusb_15382 encodes 16S rRNA
agagtttgatcatggctcaggatgaacgctggcggcgtgcctaacacatgcaagtcgaacaaagcatacgggacggagattcgtcgaagccctgtatgacttagtggcggacgggtgagtaatgtatgagcaacctgcctttcagagggggacaacagttggaaacgactgctaataccacataatgtatttgggtggcatcacttgaataccaaaggagcaatc

SEQ ID NO: 3845 - DNA, 225 bp, Unknown
  bacterial strain Ascusb_2919 encodes 16S rRNA
agagtttgatcatggctcaggacgaacgctggcggcgtgcctaacacatgcaagtcgaacggactgattcccttcggggatgaaagttagtggcggatgggtgagtaacgcgtgaggaacctgcctctcagagggggataacgtttggaaacgaacgctaataccgcataacgcttttgtaccgcatgatacggaagccaaaggagcaatccgctgagagatggc

SEQ ID NO: 3846 - DNA, 225 bp, Unknown
  bacterial strain Ascusb_8108 encodes 16S rRNA
agagtttgatcatggctcaggacgaacgctggcggcatggattaggcatgcaagtcgaacggggccctccggggcccagtggcggaagggtgagtaacacgtgagcaacccgcccccaaggccggaacaagcgctggaaacggcgtctgaaaccggatgaggacccccctcgcatgtggggtcgtccaaatattcataccctggggatgggctcgcggcccatta

SEQ ID NO: 3847 - DNA, 225 bp, Unknown
  bacterial strain Ascusb_6799 encodes 16S rRNA
agagtttgatcctggctcaggatgaatgctggcggcgtgcctaatacatgcaagtcgagcggtaacagggtttcaccgtttccttgacactctacgacatggtctagaggcagaattcgagggaacagtgaaactgctgacgagcggcggacggctgagtaacgcgtgggaacggaccccaaactgagggataacgcaccgaaaggtgtgctaataccgcatgtg

SEQ ID NO: 3848 - DNA, 225 bp, Unknown
  bacterial strain Ascusb_3164 encodes 16S rRNA
agagtttgatcatggctcaggacgaacgctggcggcgtgcctaacacatgcaagtcgaacgaagctccatgatatgagattcgtcaaattgattggatgacttagtggcggacgggtgagtaatgcgtgagcaacctgcccttcggagggggacaacagttggaaacgactgctaataccgcatgatgtatcgtgaaggcatcttcgtgataccaaagatttatc

SEQ ID NO: 3849 - DNA, 225 bp, Unknown
  bacterial strain Ascusb_10986 encodes 16S rRNA
agagtttgatcatggctcagaacgaacgccggcggcgcgtcttaagcatgcaagtcgggcgggattgaggggcttgctcctcatgagagcggcggactggtgagtaacgcgtgggcgacgtaccccctgcaccgggacagccggcagaaatgccgggtgatacgggatgagctcttaccctgcggtggggtgagaggaaagcggctacggccgcggcaggggaac

SEQ ID NO: 3850 - DNA, 225 bp, Unknown
  bacterial strain Ascusb_6289 encodes 16S rRNA
agagtttgatcatggctcaggataaacgctggcggcgcacataagacatgcaagtcgaacggacttaactcattcttttagattgagagcggttagtggcggactggtgagtaacacgtaagcaacctgcctattagaggggaataacaatgagaaatcattgctaataccgcataagctgataatatcgcatgatatagtcagaaaaggagcaatccgctaata

SEQ ID NO: 3851 - DNA, 225 bp, Unknown
  bacterial strain Ascusb_9998 encodes 16S rRNA
agagtttgatcctggctcagagttaacgctggcatcgtgcataacacatgcaagtcgaacgggacttagttttgtagcaatacagaattaagtttagtggcagacgggtgagtaatgtataaggaatctaccttcgagtggggaataacagtccgaaaggattgctaataccccataacataatcaagtggcatcacttgattatcaaagatttatcgcttgaag

SEQ ID NO: 3852 - DNA, 225 bp, Unknown
  bacterial strain Ascusb_106 encodes 16S rRNA
agagtttgatcatggctcaggatgaacgctggcggcgtgcctaacacatgcaagtcgaacgggactatcaagtgatgttttcggactgaactttttagtttagtggcggacgggtgagtaacgcgtggacaacctgcctctcactgggggatagcagctggaaacggctggtaataccgcatgcgttcaatgtgccgcatgacacattgaagaaagatttatcgg

SEQ ID NO: 3853 - DNA, 225 bp, Unknown
  bacterial strain Ascusb_8774 encodes 16S rRNA
agagtttgatcctggctcaggacgaacgctggcggcgtgcctaacacatgcaagtcgaacgaagctccggatctgatccttcgggtgaagtgaaggaagacttagtggcggacgggtgagtaacgcgtgagcaacctgcctttcagagggggataacagttggaaacgactgctaataccgcataacataagatcatcgcatggtggttttatcaaagctgaggc

SEQ ID NO: 3854 - DNA, 225 bp, Unknown
  bacterial strain Ascusb_17279 encodes 16S rRNA
agagtttgatcctggctcaggacgaacgctggcggcgcgcttaacacatgcaagtcgaacggagcttgaacgagcgtcttcggacaaacgtttaaacttagtggcggacgggtgagtaacgcgtgagcaaccggtcctgaagagggggacaacattgagaaatcaatgctaataccgcgtaagaccacactgcggcatcgcagaggggtcaaaggagagatccgc

SEQ ID NO: 3855 - DNA, 225 bp, Unknown
  bacterial strain Ascusb_2411 encodes 16S rRNA
agagtttgatcctggctcaggatgaacgctggcggcgtgcctaacacatgcaagtcgaacgaagcatttctgctgaaccttcgggtgatgcggatttgactgagtggcggacgggtgagtaacgcgtgggtaacctgccctgtacagggggataacagccagaaatggctgctaataccgcataagcgcaggccgtggcatcatggtctgcggaaaactccggtg

SEQ ID NO: 3856 - DNA, 225 bp, Unknown
  bacterial strain Ascusb_115 encodes 16S rRNA
agagtttgatcatggctcaggatgaacgctagctacaggcttaacacatgcaagtcgaggggcagcattgggatagcttgctattccagatggcgaccggcgcacgggtgagtaacgcgtatccaaccttccctatagtagagaatagcccggcgaaagtcggattaatgctctatgttgtgttttgaggacatctgacgaacaccaaaggttcaccgctatagg

SEQ ID NO: 3857 - DNA, 225 bp, Unknown
  bacterial strain Ascusb_76 encodes 16S rRNA
agagtttgatcatggctcaggacgaacgctggcggcgtgcttaacacatgcaagtcgagcgatgaagttccttcgggaatggattagcggcggacgggtgagtaacacgtgggtaacctaccttatagtggggaatagcctttcgaaaggaagattaataccgcataagattgtagtttcgcatgaaatagcaattaaaggagcaattcgctataagatggaccc

SEQ ID NO: 3858 - DNA, 225 bp, Unknown
  bacterial strain Ascusb_4374 encodes 16S rRNA
agagtttgatcatggctcaggatgaacgctggcggcgtgcttaacacatgcaagtcgaacgaggttacttattacgatcccttcggggtgacgatttttaaccgagtggcggacgggtgagtaacgcgtgggcaacctgccccatacagggggataacagttggaaacgactgacaataccgcataagcgcacgatctcgcatgggattgtgtgaaaaactccgg

SEQ ID NO: 3859 - DNA, 225 bp, Unknown
  bacterial strain Ascusb_8421 encodes 16S rRNA
agagtttgatcatggctcaggacgaacgctggcggcgtgcctaacacatgcaagtcgaacgggggttttgcttcggtagaaccttagtggcgaacgggtgagtaacgcgtaggcaacctgccccccggattgggacaacaccccgaaaggggtgctaataccggatacgaagatagcaccgcatggtgatattttgaaagatggcctctacaggtaagctatcgc

SEQ ID NO: 3860 - DNA, 225 bp, Unknown
  bacterial strain Ascusb_2383 encodes 16S rRNA
agagtttgatcatggctcaggatgaacgctggcggcgtgcctaatacatgcaagtcgagcgagaaatgtccgattgagacttcggtggatttcggacatggaaagcggcggacgggtgagtaacgcgtaggcaacctgccctttgcacagggatagccactggaaacggtgattaatacctgataatgcatctccatcgcctgttggagatgccaaagatttatt

SEQ ID NO: 3861 - DNA, 225 bp, Unknown
  bacterial strain Ascusb_2226 encodes 16S rRNA
agagtttgatcctggctcaggatgaacgctggcggcgtgcctaacacatgcaagtcgaacggagtatatgcgcagatgatcgaagtgcttgcatagagagaatcatgtgtatacttagtggcggacgggtgagtaacgtgtggataacctggtccatccagggggatagcagcgggaaactgctgataataccgcataagcgcacagtaaggcatcttacagtgt

SEQ ID NO: 3862 - DNA, 225 bp, Unknown
  bacterial strain Ascusb_383 encodes 16S rRNA
agagtttgatcctggctcaggatgaacgctagctacaggcttaacacatgcaagtcgaggggcagcgagaaggaagcttgctttctttgtcggcgaccggcgcacgggtgagtaacgcgtatccaaccttccccttagtagggcatagcccggcgaaagtcggattaacaccctatgttttccgaagatggcatctgatttggaataaagatttatcgctaaggg

SEQ ID NO: 3863 - DNA, 225 bp, Unknown
  bacterial strain Ascusb_3469 encodes 16S rRNA
agagtttgatcctggctcaggatgaacgctagctacaggcctaacacatgcaagtcgcggggcagcatggattctgcttgcagtatccgatggcgaccggcgcacgggtgagtaacgcgtatccaacctgcctccatgcagggcacagcccggcgaaagtcggattaattccctatgccctccctcgcggacatccaatggggaggaaaggcttcggccgcatgg

SEQ ID NO: 3864 - DNA, 225 bp, Unknown
  bacterial strain Ascusb_12352 encodes 16S rRNA
agagtttgatcatggctcaggatgaacgctagctacaggcttaacacatgcaagtcgaggggcagcgctggggttgcttgcaacccctggcggcgaccggcggatgggtgagtaacgcgtatccaacctgccccgtgcccggggacagcccttagaaatgaggattaacccccgatggcgtggtcatgccgcatggtgtttccactaaaccggcacgggatgggg

SEQ ID NO: 3865 - DNA, 225 bp, Unknown
  bacterial strain Ascusb_12625 encodes 16S rRNA
agagtttgatcatggctcaggatgaatgctggcggcgtgcctaatacatgcaagtcgagcggtaacagggcttcaccgtttccttgacacacctagcgcattatcgtaggttggttagattcgagggaacagtgaagctgctgacgagcggcggacggctgagtaacgcgtgggaacggaccccaaactgagggataactagtcgaaagattagctaataccgca

SEQ ID NO: 3866 - DNA, 225 bp, Unknown
  bacterial strain Ascusb_12320 encodes 16S rRNA
agagtttgatcatggctcaggatgaacgctggcggcatgcctaagacatgcaagtcgaacgaagtggcccaatgacgattgagtgcttgcacaagatttgatttggattttccacttagtggcgcaagggtgagtaacacgtaggttatctgccttcgagtctggaataacagttagaaatgattgctaatgccggattacatataaagcgatacgttactttat

SEQ ID NO: 3867 - DNA, 225 bp, Unknown
  bacterial strain Ascusb_9555 encodes 16S rRNA
agagtttgatcatggctcaggatgaatgctggcggcgtgcctaatacatgcaagtcgagcggtaacagggcttcaccgtttccttgacacacctagcgctatatcgtaggttggttagattcgagggaacagtgaagctgctgacgagcggcggacggctgagtaacgcgtgggaacggaccccaaagtgagggataactagtcgaaagattagctaataccgca

SEQ ID NO: 3868 - DNA, 225 bp, Unknown
  bacterial strain Ascusb_4057 encodes 16S rRNA
agagtttgatcatggctcaggatgaacgctggcggcatgcctaacacatgcaagtcgaacggagctatgatggagcttgcttttttatagcttagtggcggacgggtgagtaacgcgtgaggaatctgccctcgagtggggaataacaccgagaaatcggtgctaataccgcataacgtctttggatcgcatgttctgaagaccaaaggatttattcgcttgagg

SEQ ID NO: 3869 - DNA, 225 bp, Unknown
  bacterial strain Ascusb_1219 encodes 16S rRNA
agagtttgatcatggctcaggatgaacgctagctacaggcttaacacatgcaagtcgaggggcagcgggaggaaagcttgctttccttgccggcgaccggcgaatgggtgagtaacacgtatccaacctgcccccgaccgggggatagccctccgaaaggagaattaacaccccatgggtgtccgcgcggcatcgcgcggccatgaaaggctacggtcggggatg

SEQ ID NO: 3870 - DNA, 225 bp, Unknown
  bacterial strain Ascusb_417 encodes 16S rRNA
agagtttgatcatggctcaggatgaacgctagcgacaggcctaacacatgcaagtcgaggggcagcgggattgaagcttgctttaattgccggcgaccggcgcacgggtgcgtaacaggtgtgcaatctgtccatagtcggggaatagcccagcgaaagctgaattaatactccatgtgaatcgaagccgcatgactttgatttgaaacgcaaggactatgggtg

SEQ ID NO: 3871 - DNA, 225 bp, Unknown
  bacterial strain Ascusb_2802 encodes 16S rRNA
agagtttgatcatggctcaggatgaacgctagctacaggcttaacacatgcaagtcgaggggcagcaggaatctagcttgctagatttgctggcgaccggcgcacgggtgagtaacgcgtatccaacctggcccttagtagggaatagcccggcgaaagtcggattaatgccctatgttctccgaagaaggcatctgaaatggagtaaagattgatcgctaaggg

SEQ ID NO: 3872 - DNA, 225 bp, Unknown
  bacterial strain Ascusb_1704 encodes 16S rRNA
agagtttgatcatggctcaggatgaacgctggcggcatgcctaacacatgcaagtcgaacggagttgaggagtagcttgctatgaatcaacttagtggcggacgggtgagtaacgcgtgagtaacctgcctcttagagggggataacgttctgaaaaggacgctaataccgcatataattacgaaatcgcatggttttgtaatgaaaggagcaatccgctaagag

SEQ ID NO: 3873 - DNA, 225 bp, Unknown
  bacterial strain Ascusb_6272 encodes 16S rRNA
agagtttgatcctggctcaggatgaacgctagctacaggcttaacacatgcaagtcgaggggcagcatggaggaagcttgcttcctctgatggcgaccggcgcacgggtgagtaacgcgtatccaaccttccccttagtagggcatagcccggcgaaagtcggattaataccctatgttgttcgaagaggacatctgatttgaaccaaagacttgtcgctaaggg

SEQ ID NO: 3874 - DNA, 225 bp, Unknown
  bacterial strain Ascusb_2886 encodes 16S rRNA
agagtttgatcctggctcaggatgaacgctagctacaggcttaacacatgcaagtcgaggggcagcatgggattagcttgctaatcctgatggcgaccggcgcacgggtgagtaacgcgtatccaaccttccccctactcaggcatagcccggtgaaaaccggattaactcctgatagtttcactagatggcatctgacggtgaataaagctctgcggtaaggga

SEQ ID NO: 3875 - DNA, 225 bp, Unknown
  bacterial strain Ascusb_453 encodes 16S rRNA
agagtttgatcctggctcaggatgaacgctagctacaggcttaacacatgcaagtcgaggggcatcatgggaggacttcggtccttttgatggcgaccggcgaatgggtgagtaacacgtatccgacctgccctgtactggaggatagcctcccgaaagggaaattaatactccatgtgtcaaatgtccgcatggtcgtttgatgaaagatttatcggtacagga

SEQ ID NO: 3876 - DNA, 225 bp, Unknown
  bacterial strain Ascusb_569 encodes 16S rRNA
agagtttgatcatggctcaggatgaacgctggcggcgtgcttaacacatgcaagtcgaacgaggcacctttgcagaagttttcggatggaagcggaggcgaccgagtggcggacgggtgagtaacgcgtggggaacctgccccattccgggggataccagttggaaacgactgttaataccgcataagcgcacggaaggacatccttttgtgtgaaaaactgagg

SEQ ID NO: 3877 - DNA, 225 bp, Unknown
  bacterial strain Ascusb_7167 encodes 16S rRNA
agagtttgatcatggctcaggatgaacgctagcggcaggcttaacacatgcaagtcgaggggtaacagggagtagcaatactccgctgacgaccggcgcacgggtgcgtaacgcgtatgcaacctaccttgtacagggggataacggagagaaatttccactaatatcccatggtgttgggggatcgcatgattctccgactaaagcttcggtggtacaagatgg

SEQ ID NO: 3878 - DNA, 225 bp, Unknown
  bacterial strain Ascusb_12394 encodes 16S rRNA
agagtttgatcctggctcaggatgaacgctagctacaggcttaacacatgcaagtcgaggggcagcatgatctaagcttgcttagattgatggcgaccggcgcacgggtgagtaacgcgtatccaaccttccctatagtagaggatagcccggcgaaagtcggattaatactctatgttttccaatgcagacatctaagttggaacaaaggttcaccgctatagg

SEQ ID NO: 3879 - DNA, 225 bp, Unknown
  bacterial strain Ascusb_5760 encodes 16S rRNA
agagtttgatcatggctcagaatgaacgttggcggcgtggattaggcatgcaagtcgagcggcaaggttccttcggggaccctagagcggcggaagggataggaacatatagatacgtgcctcttagcccgggatagcgtctggaaacggacgataataccggatgacgtactcgtacgaaaagtgtaattctgctaagagatcggtctatatcctattagctag

SEQ ID NO: 3880 - DNA, 225 bp, Unknown; identical to SEQ ID NO: 2967
  bacterial strain Ascusb_17962 encodes 16S rRNA

SEQ ID NO: 3881 - DNA, 225 bp, Unknown
  bacterial strain Ascusb_3971 encodes 16S rRNA
agagtttgatcatggctcaggatgaacgctggcggcgtgcttaacacatgcaagtcgaacggacttatttgagagcttgcttttagataagttagtggcggacgggtgagtaacgcgtgggtaacctgccgtatgccgggggacaacagttggaaacgactgctaataccgcataagcgcacagagtggcatcactcagtgtgaaaaactccggtggcatacgat

SEQ ID NO: 3882 - DNA, 225 bp, Unknown
  bacterial strain Ascusb_9879 encodes 16S rRNA
agagtttgatcctggctcaggatgaacgctggcggcatgcctaagacatgcaagtcgtacgaggtggcccgttgagttctgtgcttgcacaaaacaattcggatccccacctagtggcgaaagggtgagtaacacgtgggttatctacctcagagactgggataactactggaaacggtagctaataccggatgatatatagaacgatacgttgttctatagtaa

SEQ ID NO: 3883 - DNA, 225 bp, Unknown
  bacterial strain Ascusb_2185 encodes 16S rRNA
agagtttgatcatggctcaggatgaacgctggcggcgtgcctaacacatgcaagtcgagcgagaaactcatgaccaatacttcggttgcgtgattgagcggaaagcggcggacgggtgagtaacgcgtaggcaacctgccccttgcagagggatagcctcgggaaaccgggattaaaacctcataatgccgagagtcgacatcttctttcggccaaagatttatc

SEQ ID NO: 3884 - DNA, 225 bp, Unknown
  bacterial strain Ascusb_6223 encodes 16S rRNA
agagtttgatcatggctcagaacgaacgctggcggcgcgtcttaagcatgcaagtcgggcgggattggggagcttgctccccatgagagcggcggactggcgaggaacgcgtgggcgacgcgccctccggagggggacagcccgtggaaacacggggtaataccccatgacatgggaggcttggaggccttccatcaaaggagcttcggctccgccgggggagcg

SEQ ID NO: 3885 - DNA, 225 bp, Unknown
  bacterial strain Ascusb_310 encodes 16S rRNA
agagtttgatcatggctcaggatgaacgctagctacaggcttaacacatgcaagtcgaggggcagcataacgaaagcttgcttttgttgatggcgaccggcgcacgggtgagtaacgcgtatccaaccttccctatagtagagaatagcccggcgaaagtcggattaatgctctatgttcttctttgatggcatctgacgagaagcaaaggttcaccgctatagg

SEQ ID NO: 3886 - DNA, 225 bp, Unknown
  bacterial strain Ascusb_19690 encodes 16S rRNA
agagtttgatcatggctcagaacgaacgctggcggcgcgtcttaagcatgcaagtcgaacggcaagagaagtgcttgcacttctcctagagtggcggactggtgagtaacaggtgggtgacatacccttcagatggggatagccggtagaaataccgggtaataccgaatacgctcgtgcatctcggaagtgtacgaggaaaggagctacggcttcgctgttgga

SEQ ID NO: 3887 - DNA, 225 bp, Unknown
  bacterial strain Ascusb_10664 encodes 16S rRNA
agagtttgatcatggctcagaacgaacgctggcggcgcgtcttaagcatgcaagtcgggcgggaacgggaagcttgcttcccgcgagagcggcggactggtgagtaacgcgtgggtgacgtaccccccggacggggacagcctgcagaaatgcagggtaataccggatacggttctgtgcattggaagtacagaaggaaaggagctacggctccgccgggggaac

SEQ ID NO: 3888 - DNA, 225 bp, Unknown
  bacterial strain Ascusb_1109 encodes 16S rRNA
agagtttgatcatggctcaggatgaacgctggcggcgtgcttaacacatgcaagtcgaacggggttattacggaagcttgcttttgttttaacctagtggcggacgggtgagtaacgcgtgagaaacctgcccttcagtggggaataacaccgagaaatcggtgctaataccgcataatgtcggatcatcgcatgttgaaccgaccaaaggatttattcgctgaa

SEQ ID NO: 3889 - DNA, 225 bp, Unknown
  bacterial strain Ascusb_2186 encodes 16S rRNA
agagtttgatcatggctcaggatgaacgctggcggcgtgcctaacacatgcaagtcgaacgaagcactggaaacggagattcgtcgaagttttctttgacttagtggcggacgggtgagtaatgtatgagcaacctgcctttcagagggggacaacagttggaaacgactgctaataccgcgtaacgtatagagggggcatcctttttataccaaaggagcaatc

SEQ ID NO: 3890 - DNA, 225 bp, Unknown
  bacterial strain Ascusb_938 encodes 16S rRNA
agagtttgatcctggctcaggacgaacgctggcggcacgcttaacacatgcaagtcgaacggagaatttttggtttactgagaattcttagtggcggacgggtgagtaacacgtgagcaacctgcctctgagagagggatagcttctggaaacggatggtaatacctcataacatatacggaagacatcttctgtatatcaaagatttatcgctcagagatgggc

SEQ ID NO: 3891 - DNA, 225 bp, Unknown
  bacterial strain Ascusb_2035 encodes 16S rRNA
agagtttgatcatggctcaggacgaacgctggcggcgtgcttaacacatgcaagtcgaacgaggttatttaccggaagtcttcggatggaaagtggataaccgagtggcggacgggtgagtaacgcgtgagcaacctgtcttctacagggggataacactccgaaaggagcgctaataccgcataagaccacggtttcgcatgggactgaggtcaaaggagcaat

SEQ ID NO: 3892 - DNA, 225 bp, Unknown
  bacterial strain Ascusb_3790 encodes 16S rRNA
agagtttgatcatggctcaggacgaacgctggcggcgtgcttaacacatgcaagtcgaacggggatcaaattggaagtccttcgggacggaagatttgattctagtggcggacgggtgagtaacgcgtgagcaacctgtcccagacagggggataacacttggaaacaggtgctaataccgcataagaccacgggatcacatggttctgaggtaaaaggagcaat

SEQ ID NO: 3893 - DNA, 225 bp, Unknown
  bacterial strain Ascusb_17080 encodes 16S rRNA
agagtttgatcctggctcaggatgaacgctggcggcatgcctaagacatgcaagtcgaacggagcggcctattgaagacggagtgcttgcacaaagttggatttagattcccgctcagtggcagacgggtgagtaacacgtgggtaatctaccctagagactgggacaacagttggaaacgactgctaataccggatgattcatatttagaaaactagatatgct

SEQ ID NO: 3894 - DNA, 225 bp, Unknown
  bacterial strain Ascusb_7346 encodes 16S rRNA
agagtttgatcctggctcaggatgaacgctagcggcaggcttaacacatgcaagtcgaggggcagcggggcccagcaatgggctgccggcgaccggcgcacgggtgcgtaacgcgtatgcaacctgcccgcgacagggggataaccggtggaaacgccgactaataccccgtaacgcacggtctcgcatgggattgtgctgaaagcttcggtggtcgcggatggg

SEQ ID NO: 3895 - DNA, 225 bp, Unknown
  bacterial strain Ascusb_4539 encodes 16S rRNA
agagtttgatcatggctcaggatgaacgctagcggcaggcttaacacatgcaagtcgaggggcagcggggtgtagcaatacactgccggcgaccggcgcacgggtgcgtaacgcgtatgcaacctgcccgtaacagggggataacggagagaaatttccactaataccccatatagccgtttggccgcatggtcaggcggcgaaagccttggtggttacggatgg

SEQ ID NO: 3896 - DNA, 225 bp, Unknown
  bacterial strain Ascusb_4883 encodes 16S rRNA
agagtttgatcctggctcaggatgaacgctggcggcgtgcctaacacatgcaagtcgaacggagatcttattgatggagacttcggtcaaaagaggtttgatcttagtggcggacgggtgagtaacgcgtggagaacctgccctgtacagggggataacaggcagaaatgcctgctaataccgcataagcgcacgggagcgcatgcttctgtgtgaaaaactccg

SEQ ID NO: 3897 - DNA, 225 bp, Unknown
  bacterial strain Ascusb_14062 encodes 16S rRNA
agagtttgatcatggctcaggatgaacgctggcggcatgcctaagacatgcaagtcgaacgaagtagtccaaagaagaatgagtgcttgcacgaatttggaaatggtacgctacttagtggcagacgggtgagtaacacgtgggtaacctacctcagagactgggataacaattagaaatgattgctaataccggatgatttgtaatatgataacatgttatact

SEQ ID NO: 3898 - DNA, 225 bp, Unknown
  bacterial strain Ascusb_855 encodes 16S rRNA
agagtttgatcatggctcaggatgaacgctggcggcgtgcctaacacatgcaagtcgagcggagttaagttttcggatttaacttagcggcggatgggtgagtaacgcgtggataacctgccctgctcagggggataacagttggaaacggctgttaataccgcatatgcacacagtaccgcatggtacagggtggaaagattttatcggagcaggatggatccg

SEQ ID NO: 3899 - DNA, 225 bp, Unknown
  bacterial strain Ascusb_9297 encodes 16S rRNA
agagtttgatcatggctcaggatgaacgctagctacaggcctaacacatgcaagtcgaggggcatcgcgggagtgagcaatcacacccggcggcgaccggcggatgggtgagtaacgcgtatccaacctgccccatgcccgggcacagcccctggaaacggggagtgactcccgatggcgccatttggccgcatggccttctggctaaatttcgaggcatgggat

SEQ ID NO: 3900 - DNA, 225 bp, Unknown
  bacterial strain Ascusb_351 encodes 16S rRNA
agagtttgatcatggctcaggatgaacgctagctacaggcttaacacatgcaagtcgaggggcagcatgaagatgtgcttgcacaactttgatggcgaccggcgcacgggtgagtaacgcgtatccaaccttccctatagtagagaatagcccggcgaaagtcggattaatgctctatgttcttctttgatggcatctgaggagaagcaaaggttcaccgctata

SEQ ID NO: 3901 - DNA, 225 bp, Unknown
  bacterial strain Ascusb_4309 encodes 16S rRNA
agagtttgatcatggctcaggatgaacgctggcggcgtgcctaacacatgcaagtcgaacggagatttaacgctgatgaggcttcggccaagtcttgttaaatcttagtggcggacgggtgagtaacgcgtgggcaacctgcctcgtactgggggataacagttggaaacgactgttaataccgcataagcgcacggtgtcgcatgacacagtgtgaaaaactcc

SEQ ID NO: 3902 - DNA, 225 bp, Unknown
  bacterial strain Ascusb_4720 encodes 16S rRNA
  misc_feature (199)..(225): n is any nucleotide
agagtttgatcatggctcaggatgaacgctggcggcgtgcctaacacatgcaagtcgaacggggttaagggaaattttcggatggaacttaacttagtggcggacgggtgagtaacgcgtggataacctgcctcacactgggggatagcagctggaaacggctggtaataccgcataagaccacagcaccgcggtaatnnnnnnnnnnnnnnnnnnnnnnnnnnn

SEQ ID NO: 3903 - DNA, 225 bp, Unknown
  bacterial strain Ascusb_2378 encodes 16S rRNA
agagtttgatcctggctcaggatgaacgctagctacaggcttaacacatgcaagtcgaggggcagcatgggagttgcttgcaactcttgatggcgaccggcgcacgggtgagtaacgcgtatccaaccttcccctcagtagggcatagcccgtagaaatgcggattaataccctatgtggtccgatgaggacatctgagctggacgaaaggtttaccgctgaggg

SEQ ID NO: 3904 - DNA, 225 bp, Unknown
  bacterial strain Ascusb_6087 encodes 16S rRNA
agagtttgatcatggctcagaacgaacgctggcggcgcgtcttaagcatgcaagtcggacggcaagggaagtgcttgcacttctcccagagtggcggactggtgagtaacacgtgggtgacgtacccccgggacggggatagctcctagaaataggaggtaataccggatacgaccgcagacgtaggtgtctgcgaggaaaggagctctggctccgcccggggaa

SEQ ID NO: 3905 - DNA, 225 bp, Unknown
  bacterial strain Ascusb_485 encodes 16S rRNA
agagtttgatcatggctcaggatgaacgctggcggcgtgcctaatacatgcaagtcgagcgagaatctgatgacttgagattcgttgaaatgattcagaggaaagcggcggacgggtgagtaacgcgtaggcaacctgcccttagcagagggatagccattggaaacgatgattaaaacctcataacgctgttttaacacatgttgagacagccaaagatttatc

SEQ ID NO: 3906 - DNA, 225 bp, Unknown
  bacterial strain Ascusb_7324 encodes 16S rRNA
agagtttgatcatggctcaggatgaacgctggcggcgtgcttaacacatgcaagtcgaacgaagccaaaaggaagcttgctttctttgaagcttagtggcggacgggtgagtaacgcgtgaggaacctgcccttcagtggggaataacagccggaaacgactgctaataccgcataacgtcatcggaccgcatgatctggtgaccaaaggatttattcgctgaag

SEQ ID NO: 3907 - DNA, 225 bp, Unknown
  bacterial strain Ascusb_680 encodes 16S rRNA
agagtttgatcatggctcaggacgaacgctggcggcacgcttaacacatgcaagtcgaacggagttttagagagcttgctttttaaaacttagtggcggacgggtgagtaacacgtgagcaatctgcctttcagagggggatagcagttggaaacgactgataataccgcataacatagcaagaccgcatgatcatgctatcaaagatttatcgctgaaagatga

SEQ ID NO: 3908 - DNA, 225 bp, Unknown
  bacterial strain Ascusb_2801 encodes 16S rRNA
agagtttgatcatggctcaggacgaacgctggcggcgtgcctaatacatgcaagtcgaacggagctagagacttcggtttctaacttagtggcgaacgggtgagtaacgcgtgagcaacctgactcaaagagggggacaacagctggaaacggctgctaataccgcataagaccacaatgtggcatcacgaaggggtcaaagaatttcgctttgagaggggctcg

SEQ ID NO: 3909 - DNA, 225 bp, Unknown
  bacterial strain Ascusb_2590 encodes 16S rRNA
agagtttgatcatggctcaggatgaacgctagctacaggcttaacacatgcaagtcgaggggcagcatgaagtcagcttgctgactttgatggcgaccggcgcacgggtgcgtaacacgtatccaatctgcccgttactcagggatagcctttcgaaagaaagattaatacctgatggtttccttaggtcgcatgacctgcggaataaagatatatcggtaacgg

SEQ ID NO: 3910 - DNA, 225 bp, Unknown
  bacterial strain Ascusb_1586 encodes 16S rRNA
agagtttgatcatggctcaggatgaacgctggcggcgtgcttaacacatgcaagtcgaacgagggttgctggttgaagttttcggatggaaaccggtaattcctagtggcggacgggtgagtaacgcgtggggaacctgccccgctccgggggataccagctggaaacggctgttaataccgcataagcgcacagcattgcatgatgcagtgtgaaaaactccgg

SEQ ID NO: 3911 - DNA, 225 bp, Unknown
  bacterial strain Ascusb_19487 encodes 16S rRNA
agagtttgatcatggctcaggatgaacgctagctacaggcttaacacatgcaagtcgcggggcagcatggtcttagcttgctaaggctgatggcgaccggcgcacgggtgagtaacgcgtatccaaccttccccttagtagggcatagcccggcgaaagtcggattaataccctatgttgttcgaagcagacatctaatttgaaccaaagatttatcgctaaggg

SEQ ID NO: 3912 - DNA, 225 bp, Unknown
  bacterial strain Ascusb_4646 encodes 16S rRNA
agagtttgatcatggctcaggattaacgctggcggcgtgcttaacacatgcaagtcgaacggggtatgagacttcggttttatacctagtggcggacgggtgagtaacgcgtgggcaacctgccctgtaccgggggacaacagctggaaacggctgctaataccgcataagcgcacaaaaccgcatggttttgtgtgaaaagatttatcagtacaggatgggccc

SEQ ID NO: 3913 - DNA, 225 bp, Unknown
  bacterial strain Ascusb_2238 encodes 16S rRNA
agagtttgatcctggctcaggatgaacgctggcggcgtgcttaacacatgcaagtcgaacggactttacatgaagcctagcgaatgtaaagttagtggcggacgggtgagtaacgcgtgggtaacctgccgtatgctgggggacaacagttggaaacgactgctaataccgcataagcgcacagaaccgcatggttcagtgtgaaaaactccggtggcatacgat

SEQ ID NO: 3914 - DNA, 225 bp, Unknown
  bacterial strain Ascusb_4596 encodes 16S rRNA
agagtttgatcatggctcaggatgaacgctggcggcgtgcctaacacatgcaagtcgaacgaagctcttgatgcggagatttcggtcaaagcggatagatgactgagtggcggacgggtgagtaacgcgtgggcaacctgccctatactgggggatagcagttggaaacgactgataataccgcataagcgcacggaagggcatccttctgtgtgaaaagattta

SEQ ID NO: 3915 - DNA, 225 bp, Unknown
  bacterial strain Ascusb_4227 encodes 16S rRNA
agagtttgatcctggctcaggacgaacgcttgcggcgtgcctaagaaatgcaagtcgagcgaagtccagggtgcttgcacccgaagacttagcggcgaacggtcgcgtaacacgtaagcaacctgccctaaagacggggatagcccaccgaaaggtggattaataccggatgtgaacacttattcgcatgtattagtgtttaaagcagcaatgcgctttaggatg

SEQ ID NO: 3916 - DNA, 225 bp, Unknown
  bacterial strain Ascusb_4150 encodes 16S rRNA
agagtttgatcctggctcagagttaacgctggcatcgtgcataacacatgcaagtcgaacgggacttagtttgtagcttgctatagactaagtttagtggcagacgggtgagtaatgtataaggaacctacctctgagtggggaataacagtccgaaaggattgctaataccccataacataacttagtggcatcactgagttatcaaagatttatcgcttggag

SEQ ID NO: 3917 - DNA, 225 bp, Unknown
  bacterial strain Ascusb_3902 encodes 16S rRNA
agagtttgatcatggctcaggatgaacgctagctacaggcttaacacatgcaagtcgaggggcagcatgaagtcagcttgctgactttgatggcgaccggcgcacgggtgcgtaacacgtatccaatctacccatctgctcggggatagcctttcgaaagaaagattaatacccgatggtttcgttttttcgcatgagaagatgaataaagatttatcggcgatg

SEQ ID NO: 3918 - DNA, 225 bp, Unknown
  bacterial strain Ascusb_1486 encodes 16S rRNA
agagtttgatcatggctcaggacgaacgctggcggcacgcttaacacatgcaagtcgaacggagttattggaagcttgcttttaataacttagtggcggacgggtgagtaacacgtgagcaacctgcctttgagagcggaatagcttctggaaacggatggtaataccgcataacattaccggaccgcatgatctggtaatcaaagatttatcgctcaaagatgg

SEQ ID NO: 3919 - DNA, 225 bp, Unknown
  bacterial strain Ascusb_2584 encodes 16S rRNA
agagtttgatcatggctcaggatgaacgctggcggcgtgcttaacacatgcaagtcgaacggagttatgtttttgagatcttcggatggatgagatataacttagtggcggacgggtgagtaacgcgtggggaacctgccccataccgggggacaacagttggaaacgactgctaataccgcataagcgcacgggaggacatcctccagtgtgaaaaactccggt

SEQ ID NO: 3920 - DNA, 225 bp, Unknown
  bacterial strain Ascusb_17128 encodes 16S rRNA
agagtttgatcatggctcaggatgaacgctagctacaggcttaacacatgcaagtcgaggggcagcgagaggaaagcttgctttccttgtcggcgaccggcgcacgggtgagtaacgcgtatccaaccttccccttagtagggcatagcccggcgaaagtcggattaacaccctatgttatccgaagaggacatctgaactggattaaaggtttaccgctaaggg

SEQ ID NO: 3921 - DNA, 225 bp, Unknown
  bacterial strain Ascusb_38 encodes 16S rRNA
agagtttgatcatggctcagagcgaacgctggcggcatgcttaacacatgcaagtcgcacgaaggtttcggccttagtggcggacgggtgagtaacgcgtaggtatctatccatgggtgggggataacactgggaaactggtgctaataccgcatgacacctgagggtcaaaggcgcaagtcgcctgtggaggagcctgcgtttgattagctagttggtggggta

SEQ ID NO: 3922 - DNA, 225 bp, Unknown
  bacterial strain Ascusb_12323 encodes 16S rRNA
agagtttgatcatggctcaggacgaacgctggcggcgtgcctaacacatgcaagtcgaacggaactgacgccggttcttcggaaccattgtcagtttagtggcggacgggtgagtaacgcgtgagtaacctgcctctgagaggggaataacgttctgaaaagaacgctaataccgcataacatagtgaagtcgcatggctttgctatcaaagattttatcgctcg

SEQ ID NO: 3923 - DNA, 225 bp, Unknown
  bacterial strain Ascusb_4420 encodes 16S rRNA
agagtttgatcatggctcaggacgaacgctggcggcgtgcctaacacatgcaagtcgaacggagttattttgacagattccttcgggatgacggatttataacttagtggcggacgggtgagtaacgcgtgagtaacctgcctctaagaggggaataacgttctgaaaagatcgctaataccgcataacatattgaagccgcatgactttgatatcaaagattta

SEQ ID NO: 3924 - DNA, 225 bp, Unknown
  bacterial strain Ascusb_2347 encodes 16S rRNA
agagtttgatcatggctcaggacgaacgctggcggcgtgcctaacacatgcaagtcgaacggagcgaaagaagcttgcttctggcgcttagtggcggacgggtgagtaacacgtgagtaacctgcctttcagaggggaataatgtttggaaacggacactaataccgcataatgtattttaaccgcatggttgagataccaaaggagcaatccgctgaaagatgg

SEQ ID NO: 3925 - DNA, 225 bp, Unknown
  bacterial strain Ascusb_12793 encodes 16S rRNA
agagtttgatcatggctcaggatgaacgctggcggcgtgcctaacacatgcaagtcgaacgaagcactttagccgatccttcgggtgaagctttagtgactgagtggcggacgggtgagtaacgcgtgggtaacctgccctgtacagggggataacagtcagaaatgactgctaataccgcataagcgcacgagaggacatcctcttgtgtgaaaaactccggtg

SEQ ID NO: 3926 - DNA, 225 bp, Unknown
  bacterial strain Ascusb_15051 encodes 16S rRNA
agagtttgatcatggctcaggatgaacgctagctacaggcttaacacatgcaagtcgaggggtaacattggcggagcttgctctgccagatgacgaccggcgcacgggtgagtaacgcgtatccaacctgcccatgggtcagggataaacttccgaaagggagcctaatacctgatgttgtgagaagaaggcctctgattttcacgaaaggcttcggtcgccgat

SEQ ID NO: 3927 - DNA, 225 bp, Unknown
  bacterial strain Ascusb_1988 encodes 16S rRNA
agagtttgatcatggctcagaacgaacgctggcggcatggattaggcatgcaagtcgaacgggagcagcaatgctccagtggcgcaagggtgaggaacacgtgaacaacctgccttcgagttggggatagcttctggaaacgggagataataccgaataacatcaccgggtcgcatgacctggtgatcaaagcagcaatgcgcttgaagaggggttcgcgtccca

SEQ ID NO: 3928 - DNA, 225 bp, Unknown
  bacterial strain Ascusb_5474 encodes 16S rRNA
agagtttgatcctggctcaggatgaacgctagctacaggcttaacacatgcaagtcgaggggcagcatggtcttagcttgctaagactgatggcgaccggcgcacgggtgagtaacgcgtatccaaccttccccatagtagaggatagcccggcgaaagtcggattaatactctatgttcttcaatgcagacatctaggttgaagcaaagattcatcgctatggg

SEQ ID NO: 3929 - DNA, 225 bp, Unknown
  bacterial strain Ascusb_12866 encodes 16S rRNA
agagtttgatcatggctcaggatgaacgctagctacaggcttaacacatgcaagtcgaggggcatcatggagtcagcttgctgactttgatggcgaccggcgcacgggtgagtaacgcgtatccaaccttccccctaccagaggatagcccggcgaaagtcggattaatactctatgttttccttgttgggcatcttgtgaggaacaaagactcgtcggtatggg

SEQ ID NO: 3930 - DNA, 225 bp, Unknown
  bacterial strain Ascusb_2454 encodes 16S rRNA
agagtttgatcctggctcaggatgaacgctagctacaggcttaacacatgcaagtcgaggggcatcatgatcaaagcttgctttgattgatggcgaccggcgcacgggtgagtaacgcgtatccaaccttccccctagtagggcatagcccggcgaaagtcggattaataccctatgttttccaatgaggacatctgagctggaacaaagattcatcgctagggg

SEQ ID NO: 3931 - DNA, 225 bp, Unknown
  bacterial strain Ascusb_15659 encodes 16S rRNA
agagtttgatcatggctcaggatgaacgctagctacaggcctaacacatgcaagtcgaggggcagcgggaaggaagcttgctttctttgccggcgaccggcgcacgggtgcgtaacgcgtatcgaacctcccccatactcgggaatagccttgcgaaagtaagattaatgcccgatggtctcagaatatgacatcatgctttgagtaaagattcatcggtatggg

SEQ ID NO: 3932 - DNA, 225 bp, Unknown
  bacterial strain Ascusb_2348 encodes 16S rRNA
agagtttgatcatggctcaggatgaacgctggcggcgtgcctaacacatgcaagtcgaacgaggtatgctggaatgagattcgtcgaatgaaagcataccgagtggcggatgggtgagtaacgcgtggagaacctgccctatgcagggggataacagctggaaacggctgacaataccgcataagcgcacgatgccgcatggcatagagcgaaaagatttatcgg

SEQ ID NO: 3933 - DNA, 225 bp, Unknown
  bacterial strain Ascusb_7028 encodes 16S rRNA
agagtttgatcatggctcaggatgaacgctagctacaggcttaacacatgcaagtcgaggggcagcatcaggttagcttgctaacttggatggcgaccggcgcacgggtgagtaacgcgtatccaaccttccccctgctcagggatagcccgctgaaaggcggattaacacctgatagcttcactagatggcatctgacggtgaataaagataacggcaagggat

SEQ ID NO: 3934 - DNA, 225 bp, Unknown
  bacterial strain Ascusb_2352 encodes 16S rRNA
agagtttgatcatggctcaggacgaacgctggcggcacgcttaacacatgcaagtcgaacggagaaattggatttattcattttcttagtggcggacgggtgagtaacacgtgagcaacctgcctttgagaggggaatagcttcgggaaactgatggtaataccctataacatatatttgccgcatggcagatatatcaaagatttatcactcaaagatgggctc

SEQ ID NO: 3935 - DNA, 225 bp, Unknown
  bacterial strain Ascusb_2275 encodes 16S rRNA
agagtttgatcctggctcagaacgaacgctggcggcgcgtcttaagcatgcaagtcgagcggtaagttggaagcttgcttctaacctagagcggcggactggtgagtaacgcgtgggtgacgtacctttgtgacggggacagctcctagaaataggagataataccggatacgctgtatgttgtcagaggacatacaggaaaggatcttttgattcgcacagaga

SEQ ID NO: 3936 - DNA, 225 bp, Unknown
  bacterial strain Ascusb_13726 encodes 16S rRNA
agagtttgatcatggctcaggatgaacgctggcggcatgcctaagacatgcaagtcgaacgaggcgaccttaagaagactgagtgcttgcacgaagttggaagaagatcatcgcctagtggcagacgggtgagtaacacgtgggtaacctaccttaaagttggggataacagttggaaacgattgctaataccgaataagatgtacttgtacattgaaagaagcc

SEQ ID NO: 3937 - DNA, 225 bp, Unknown
  bacterial strain Ascusb_476 encodes 16S rRNA
agagtttgatcatggctcaggacgaacgctggcggcacgcttaacacatgcaagtcgaacggagaatatttggtttactgagtattcttagtggcggacgggtgagtaacacgtgagcaacctgcctttgagagagggatagcttctggaaacggatggtaatacctcataacatacagagaccgcatgatttttgtatcaaagatttatcactcaaagatgggc

SEQ ID NO: 3938 - DNA, 225 bp, Unknown
  bacterial strain Ascusb_3632 encodes 16S rRNA
agagtttgatcctggctcaggacgaacgctggcggcgtgcttaacacatgcaagtcgaacggactgagctccttcgggggcgaaagttagtggcgaacgggtgagtaacgcgtgaggaacctgcctttcagagggggacaacagttggaaacgactgctaataccgcataacatgtttctttcgcatgaaggaaacatcaaagattttatcgctgaaagatggcc

SEQ ID NO: 3939 - DNA, 225 bp, Unknown
  bacterial strain Ascusb_6159 encodes 16S rRNA
agagtttgatcatggctcaggatgaacgctggcggcgtgcctaatacatgcaagtcgaacgaggttagcaataaccgagtggcgaacgggtgagtaacacgtaggtaacctgccttacagtttgggatacccgagggaaaccttggctaataccgaataattcttcgagaggcatctcttgaagctaaaaggggcctttaaagcctcgctgaatgatggacctgc

SEQ ID NO: 3940 - DNA, 225 bp, Unknown
  bacterial strain Ascusb_4894 encodes 16S rRNA
agagtttgatcatggctcaggatgaacgctggcggcgtgcttaacacatgcaagtcgaacgaagcagcgggaacgaagttttcggactaagatcctgctgacttagtggcggacgggtgagtaacgcgtggataacctgccgtatgcagggggacaacagctggaaacggctgctaataccgcataagcgcacagatgcgcatgcatcagtgtgaaaagtcttgg

SEQ ID NO: 3941 - DNA, 225 bp, Unknown
  bacterial strain Ascusb_12833 encodes 16S rRNA
agagtttgatcatggctcaggatgaacgctagcggcaggcttaacacatgcaagtcgaggggcagcgggtgtagcaatacatgccggcgaccggcgcaagggtgcgtaacgcgtgagcgacatgcccgtgacctggggataaccgatggaaacgtcgcctaacccccaatacgatacacattcgcatggacgtgtattgaaaaccttggtggtcacggattggct

SEQ ID NO: 3942 - DNA, 225 bp, Unknown
  bacterial strain Ascusb_2917 encodes 16S rRNA
agagtttgatcctggctcaggataaacgctggcggcgtgcctaatacatgcaagtcgaacggagagagacaagcttgcttgtcgaacttagtggcgaacgggtgagtaatacataagcaacctgcccataaagtccgggataactttgggaaactggaattaataccggataggtaacgaggacgcatgttcttgttattaaaggtgagaaacgctaatggatgg

SEQ ID NO: 3943 - DNA, 225 bp, Unknown
  bacterial strain Ascusb_3499 encodes 16S rRNA
agagtttgatcctggctcaggatgaacgctagcggcaggcttaacacatgcaagtcgcggggcagcgagggtagcaatacctgtcggcgaccggcggaagggtgcgtaacgcgtgagcaacttgcccgtggttgggggataaccggtggaaacgccgcctaataccccgtaacaattggaatcacatgtttctgatttgataggtagcaatactgtccacggata

SEQ ID NO: 3944 - DNA, 225 bp, Unknown
  bacterial strain Ascusb_3047 encodes 16S rRNA
agagtttgatcctggctcaggatgaacgctagctacaggcttaacacatgcaagtcgaggggcagcatgagagtagcttgctactcttgatggcgaccggcgcacgggtgcgtaacacgtatccaatctacccatggctcgggaatagcctttcgaaagaaagattaatgcccgatggtctgtgattgagacatctcgattacagtaaagattaatcggcgatgg

SEQ ID NO: 3945 - DNA, 225 bp, Unknown
  bacterial strain Ascusb_4620 encodes 16S rRNA
agagtttgatcctggctcaggatgaacgctggcggcgtgcctaacacatgcaagtcgaacggtgatggtttgatattttcggatggataatcatcatagtggcggacgggtgagtaacgcgtggataacctgcctctcactgggggatagcagctggaaacggctggtaataccgcatacgatcctttaatcgcatgattgaaggaagaaagatttatcggtgag

SEQ ID NO: 3946 - DNA, 225 bp, Unknown
  bacterial strain Ascusb_9412 encodes 16S rRNA
agagtttgatcatggctcagaacgaacgccggcggcgcgtcttaagcatgcaagtcgagcgggattgaggggcttgcccctcatgagagcggcggactggtgagtaacgcgtgggcgacgtaccccctgcaccgggacagccggcagaaatgccgggtgatacgggatgaggtcgcagcctgtggtgggctgcgaggaaagcggctacggccgcggcaggggaac

SEQ ID NO: 3947 - DNA, 225 bp, Unknown
  bacterial strain Ascusb_1654 encodes 16S rRNA
agagtttgatcatggctcaggacgaacgctggcggcgtgcttaacacatgcaagtcgaacggagaaccccggatgaaattttcggatggattctgggaattctcagtggcggacgggtgagtaacgcgtgagcaatctgcctcagagagggggacaacagctggaaacggctgctaataccgcataagaccacactacagcattgtagaggggtaaaaggagtga

SEQ ID NO: 3948 - DNA, 225 bp, Unknown
  bacterial strain Ascusb_2155 encodes 16S rRNA
agagtttgatcctggctcaggatgaacgctggcggcgtgcctaacacatgcaagtcgaacgagaataccctgatgtttcggcggatgagtattcgagtggcggacgggtgagtaacgcgtgggtaacctgccctgtaccgggggataacagttagaaatgactgctaataccgcataagcgcacagtaccgcatggtacagtgtgaaaaactccggtggtacagg

SEQ ID NO: 3949 - DNA, 225 bp, Unknown
  bacterial strain Ascusb_4126 encodes 16S rRNA
agagtttgatcatggctcaggatgaacgctagcgacaggcctaacacatgcaagtcgagggtgattattagtttagcttgctaaattggtatgaaaccggcgcacgggtgcgtaacaggtatgcaatctgtcctataccggggaatagcccactgaaaagtggattaatgctccatgcgccatttgagggcatccttagatggtgaaactaaagggtatagggtg

SEQ ID NO: 3950 - DNA, 225 bp, Unknown
  bacterial strain Ascusb_2425 encodes 16S rRNA
agagtttgatcctggctcaggatgaacgctagctacaggcttaacacatgcaagtcgaggggcagcatgggagtagcttgctactcctgatggcgaccggcggatgggtgcgcaacgcgtgtccaacctgccccagtcccggggatagcccttggaaacgaggattaacacccgatggtgctgcatagccgcatggcttagcagctaaattgcgaggactgggat

SEQ ID NO: 3951 - DNA, 225 bp, Unknown
  bacterial strain Ascusb_3365 encodes 16S rRNA
agagtttgatcatggctcaggatgaacgctggcggcgtgcttaacacatgcaagtcgaacgaggcttgtcgacggaaattttcggatggaagacggcatgaccgagtggcggacgggtgagtaacgcgtggggaacctgccccattccgggggataccagttggaaacgactgttaataccgcataagcgcacgggaaggcatcttccagtgtgaaaaactgagg

SEQ ID NO: 3952 - DNA, 225 bp, Unknown
  bacterial strain Ascusb_6351 encodes 16S rRNA
agagtttgatcatggctcaggatgaacgctggcggcatgcctaagacatgcaagtcgaacgagacggcccaatgaagatggagtgcttgcacaaagttagatttggattcccgtctagtggcgcaagggtgagtaacacgtgggtaatctaccttcgagtctggaataacagttagaaatgattgctaatgccggattatacatccaaagatatactatggattt

SEQ ID NO: 3953 - DNA, 225 bp, Unknown
  bacterial strain Ascusb_3851 encodes 16S rRNA
agagtttgatcatggctcaggatgaacgctagctacaggcttaacacatgcaagtcgaggggcagcatggaggaagcttgcttcctctgatggcgaccggcgcacgggtgagtaacgcgtatccaacctgcccattactctgggatagcccgccgaaaggcgaattaataccggatagtgttcttagatggcatcagacaaggactaaaggttttttccggtaat

SEQ ID NO: 3954 - DNA, 225 bp, Unknown
  bacterial strain Ascusb_18558 encodes 16S rRNA
agagtttgatcatggctcaggacgaacgctggcggcgtgcttcatacatgcaagtcgaacgataaggttccttcgggaatacataagtggcggacgggtgagtaatgtgtagagaatctgccctgaagtgggggacaacagagggaaacttctgctaataccccatatgagcgtagttgtgatactattcttgaaagatttatcgcttcaggatgagtctgcatc

SEQ ID NO: 3955 - DNA, 225 bp, Unknown
  bacterial strain Ascusb_3172 encodes 16S rRNA
agagtttgatcatggctcaggacgaacgctggcggcgtgcttaacacatgcaagtcgaacgaggatatactgcggaaggcttcggctggaaggggtgtattcgagtggcggacgggtgagtaacgcgtgagcaatctgtcccagacaggggaataacacttggaaacaggtgctaataccgcataagaccacagtatcgcatggtacagaggtaaaaggagcaat

SEQ ID NO: 3956 - DNA, 225 bp, Unknown
  bacterial strain Ascusb_4766 encodes 16S rRNA
agagtttgatcatggctcaggacgaacgctggcggcgtgcttaacacatgcaagtcgaacgaggatagattggaagcttgcttttgatttattcgagtggcggacgggtgagtaacgcgtgaataatctgtcctatacagggggataacgcatcgaaagatgtgctaataccgcgtaggaccacgatgtcgcatggcattgaggtgaaaggagcaatccagtata

SEQ ID NO: 3957 - DNA, 225 bp, Unknown
  bacterial strain Ascusb_3900 encodes 16S rRNA
agagtttgatcatggctcaggacgaacgctggcggcgtgcctaacacatgcaagtcgaacggaactattatgaaggattcttcggatgacggatttttagtttagtggcggacgggtgagtaacgcgtgagtaacctgcctttgagaggggaataacgttctgaaaagaacgctaataccgcataacgtatgttggtcgcatggccgatgtaccaaagattttat

SEQ ID NO: 3958 - DNA, 225 bp, Unknown
  bacterial strain Ascusb_2677 encodes 16S rRNA
agagtttgatcatggctcaggatgaacgctagcgacaggcctaacacatgcaagtcgagcggcagcacctcgggtggcgagcggcgcacgggtgagtaacgcgtatgtaacctgcccatgagtgggggatagcccggtgaaaaccggattaataccccatgataccattgtctgacatcatttaatggttaaagattcattgctcatggatggacatgcgttgga

SEQ ID NO: 3959 - DNA, 225 bp, Unknown
  bacterial strain Ascusb_15958 encodes 16S rRNA
agagtttgatcctggctcaggacgaacgctggcggcacgcttaacacatgcaagtcgaacggagataatttgagtttacttagattatcttagtggcggacgggtgagtaacacgtgagcaacctaccttagagagagggatagcttctggaaacggatggtaatacctcataacataaccgaaccgcatgatttggttatcaaagatttatcactctgagatgg

SEQ ID NO: 3960 - DNA, 225 bp, Unknown
  bacterial strain Ascusb_1476 encodes 16S rRNA
agagtttgatcatggctcaggacgaacgctggcggcacgcttaacacatgcaagtcgaacggagaatttttggtttactagaaattcttagtggcggacgggtgagtaacacgtgagcaacctgcctctgagagggggatagcttctggaaacggatggtaataccctatgacataacgaagccgcatgactttgttatcaaagatttatcactcagagatgggc

SEQ ID NO: 3961 - DNA, 225 bp, Unknown
  bacterial strain Ascusb_6514 encodes 16S rRNA
agagtttgatcatggctcaggatgaacgctagctacaggcttaacacatgcaagtcgaggggcatcatgatcaaagcttgctttgattgatggcgaccggcgcacgggtgagtaacgcgtatccaaccttccccctagtagggcatagcccggcgaaagtcggattaataccctatgttttccgttgatggcatctgacatggaacaaagattcatcgctagggg

SEQ ID NO: 3962 - DNA, 225 bp, Unknown
  bacterial strain Ascusb_5993 encodes 16S rRNA
agagtttgatcatggctcaggatgaacgctggcggcgtgcctaacacatgcaagtcgaacggagagattttcttcggaggatctcttagtggcggacgggtgagtaacgcgtgggtaacctgccttacaccgggggacaacagttggaaacgactgctaataccgcataagcccacgggaccgcatggtccagtgagaaaagattcattggtgtaagatgggccc

SEQ ID NO: 3963 - DNA, 225 bp, Unknown
  bacterial strain Ascusb_6753 encodes 16S rRNA
agagtttgatcctggctcagaacgaacgctggcggcgcgtcttaagcatgcaagtcgggcgggattggggagcttgctccccatgagagcggcggactggcgaggaacgcgtgggcgacgcgccctccggagggggacagcccgtggaaacacggggtaataccccatgacatggttggcttggaggcctatcatcaaaggagcttcggctccgccgggggagcg

SEQ ID NO: 3964 - DNA, 225 bp, Unknown
  bacterial strain Ascusb_5168 encodes 16S rRNA
agagtttgatcctggctcaggatgaacgctagctacaggcttaacacatgcaagtcgaggggcagcatgagatcagcttgctgatcttgatggcgaccggcgcacgggtgagtaacgcgtatccaaccttccccctgctcagggatagcccgctgaaaggcggattaacacctgatagcttcactagatggcatctgacggtgaataaagataacggcaagggat

SEQ ID NO: 3965 - DNA, 225 bp, Unknown
  bacterial strain Ascusb_5300 encodes 16S rRNA
agagtttgatcatggctcaggatgaacgctagcggcaggcttaacacatgcaagtcgaggggcagcgcggaagtagtaatacttttggcggcgaccggcgcaagggtgcgtaacgcgtgagcgacatgcccgtaaccgggggataaccgatggaaacgtcgcctaaccccccataacaccagtttctgcatggtgactggttgaaaactctggtggttacggatt

SEQ ID NO: 3966 - DNA, 225 bp, Unknown
  bacterial strain Ascusb_1932 encodes 16S rRNA
agagtttgatcatggctcaggataaacgctggcggcgcacataagacatgcaagtcgaacggacttaaccgatagtttactattggagcggttagtggcggactggtgagtaacgcgtaagcaatctgcctattagagggggataacagtgagaaattactgctaataccgcatatgctgtgagtaccacatggtacaaacaggaaaggagcaatccactaatag

SEQ ID NO: 3967 - DNA, 225 bp, Unknown
  bacterial strain Ascusb_21072 encodes 16S rRNA
agagtttgatcatggctcaggatgaacgctggcggcatgcctaagacatgcaagtcgaacgaagtagcctattgaagattgagtgcttgcacaagattggatttagattcctacttagtggcagacgggtgagtaacacgtgggtaatctacctcagagactgggataacgtttagaaatgaacgctaataccggatgatttgtaaatggataactatttatact

SEQ ID NO: 3968 - DNA, 225 bp, Unknown
  bacterial strain Ascusb_12507 encodes 16S rRNA
agagtttgatcctggctcaggatgaacgctagctacaggcttaacacatgcaagtcgaggggcatcggggatctagcttgctagatctgccggcgaccggcgcacgggtgagtaacgcgtatccaaccttccccccagtagggcatagcccggcgaaagtcggattaataccctatgttgtgtcatgaggacatctgaataacaccaaagatttatcgctggggg

SEQ ID NO: 3969 - DNA, 225 bp, Unknown
  bacterial strain Ascusb_10532 encodes 16S rRNA
agagtttgatcatggctcagaacgaacgctggcggcgcgtcttaagcatgcaagtcgggcggcaaggatgtgcttgcacatccctagagcggcggactggtgagtaacgcgtgggtgacgcaccctccggacggggatagcctgcagaaatgcagggtaataccggatacggttccgtgtcctggaagcacggaaggaaaggagcttcggctccgccggaggagc

SEQ ID NO: 3970 - DNA, 225 bp, Unknown
  bacterial strain Ascusb_1523 encodes 16S rRNA
agagtttgatcatggctcaggatgaacgctggcggcgtgcttaacacatgcaagtcgaacggagcttataatgggaagcttgctttccgccttaagcttagtggcggacgggtgagtaacgcgtgagcaacctgccctcgagtggggaataacatcgagaaatcggtgctaataccgcataatatggagagaccgcatgatctttccatcaaaggatttattcgc

SEQ ID NO: 3971 - DNA, 225 bp, Unknown
  bacterial strain Ascusb_5676 encodes 16S rRNA
agagtttgatcatggctcaggatgaacgctggcggcgtgcttaacacatgcaagtcgaacgagggttaccggttgaagttttcggacggaaactggtaattcctagtggcggacgggtgagtaacgcgtggggaacctgccccattccgggggataccagttggaaacgactgttaataccgcataagcgcacggtactgcatggtacagtgtgaaaaactccgg

SEQ ID NO: 3972 - DNA, 225 bp, Unknown
  bacterial strain Ascusb_20 encodes 16S rRNA
agagtttgatcatggctcaggatgaacgctggcggcgtgcctaacacatgcaagtcgagcggagttaagttttcggatttaacttagcggcggatgggtgagtaacacgtgggtaacctgccctgcacagggggataacagttggaaacgactgttaataccgcatatgcacacagcaccgcatggtgccgggtggaaagatttatcggtgcaggatgggcccgc

SEQ ID NO: 3973 - DNA, 225 bp, Unknown
  bacterial strain Ascusb_4601 encodes 16S rRNA
agagtttgatcctggctcagagttaacgctggcatcgtgcataacacatgcaagtcgaacgggactttgctttgtagcaatacagagtaaagtttagtggcagacgggtgagtaatgtatgggaaatctacctttgagtggggaataacggtccgaaaggattgctaataccccataacatttctcggtggcatcacttggaaatcaaagatttatcgcttgaag

SEQ ID NO: 3974 - DNA, 225 bp, Unknown
  bacterial strain Ascusb_624 encodes 16S rRNA
agagtttgatcatggctcaggatgaacgctagctacaggcttaacacatgcaagtcgaggggcagcgagaagaaagcttgctttctttgtcggcgaccggcgcacgggtgagtaacgcgtatccaaccttccccttagtagaggatagcccggcgaaagtcggattaatactctatgttattcgtagatgacatctgaaatgaatcaaaggtttaccgctaaggg

SEQ ID NO: 3975 - DNA, 225 bp, Unknown
  bacterial strain Ascusb_1754 encodes 16S rRNA
agagtttgatcatggctcaggataaacgctggcggcgtgcttaacacatgcaagtcgaacggagtggttctcccgagaagtgacgaagcttgcttcggaatgactcatttgaatcacttagtggcggacgggtgagtaacgcgtgggtaacctgccctatactgggggatagcagttggaaacgactgataataccgcataagcacacagcatcgcatgttgcag

SEQ ID NO: 3976 - DNA, 225 bp, Unknown
  bacterial strain Ascusb_7814 encodes 16S rRNA
agagtttgatcatggctcaggatgaacgctagctacaggcttaacacatgcaagtcgaggggcagcatgctggtagcttgctatcagcgatggcgaccggcgcacgggtgcgtaacacgtatccaatctacccatggctcggggatagcctttcgaaagaaagattaatacccgatggtctgcgattgagacatctcgattacagtaaagattaatcggcgatgg

SEQ ID NO: 3977 - DNA, 225 bp, Unknown
  bacterial strain Ascusb_629 encodes 16S rRNA
agagtttgatcatggctcaggatgaacgctggcggcgtgcctaacacatgcaagtcgaacgaggtgagaccttcgggttgatccgagtggcggacgggtgagtaacgcgtgggtaacctaccctgtacagggggacaacagttggaaacgactgctaataccgcataagcccacgggaccgcatggtcctgtgagaaaagttcaggcggtacaggatggacccgc

SEQ ID NO: 3978 - DNA, 225 bp, Unknown
  bacterial strain Ascusb_6114 encodes 16S rRNA
agagtttgatcctggctcaggatgaacgctggcggcgtgcttaacacatgcaagtcgaacgaagcgtcccgcccgatgaagtggagtacttgtacaaagtggattcaattgggatgacttagtggcggacgggtgagtaacgcgtgggtaacctgccttacacagggggacaacagttggaaacgactgctaataccgcataacccgctagtaccgcatggtaca

SEQ ID NO: 3979 - DNA, 225 bp, Unknown
  bacterial strain Ascusb_5038 encodes 16S rRNA
agagtttgatcatggctcaggatgaatgctggcggcgtgcctaatacatgcaagtcgagcggtaacagggcttcaccgtttccttgacgcacttggccatagagcaagtagttgaattcgagggaacagtgaagctgctgacgagcggcggacggctgagtaacgcgtgggaacggaccccaaactgagggataacgcaccgaaaggtgtgctaataccgcatgt

SEQ ID NO: 3980 - DNA, 225 bp, Unknown
  bacterial strain Ascusb_4910 encodes 16S rRNA
agagtttgatcctggctcaggacgaacgctggcggcgtgcttaacacatgcaagtcgaacgagaatcactggaaggagttttcggacaacggaaggtgaggacagtggcggacgggtgagtaacgcgtgaggaacctgcctttcagagggggacaacagttggaaacgactgctaataccgcataacgcatagttgtcgcatggcgattatgccaaagatttatc

SEQ ID NO: 3981 - DNA, 225 bp, Unknown
  bacterial strain Ascusb_18736 encodes 16S rRNA
agagtttgatcctggctcaggatgaacgctggcggcacgcctaacacatgcaagtcgaacggtgttattgaagcttgctttgataacatagtggcggacgggtgagtaacacgtgagcaacctgccttcaagtgagggatagcttctggaaacggatggtaataccttataaaataattttatcgcatggtagaattatcaaagatttattgcttgaagatgggc

SEQ ID NO: 3982 - DNA, 225 bp, Unknown
  bacterial strain Ascusb_175 encodes 16S rRNA
agagtttgatcatggctcaggatgaacgctggcggcgtgcctaacacatgcaagtcgaacgaagcagtcctctccggagggctgactgagtggcggacgggtgagtaacgcgtgggtaacctgccctgtacagggggataacagtcagaaatgactgctaataccgcataagcgcacgggaagacatctttctgtgtgaaaaactccggtggtacaggatgggcc

SEQ ID NO: 3983 - DNA, 225 bp, Unknown
  bacterial strain Ascusb_3086 encodes 16S rRNA
agagtttgatcatggctcaggatgaacgctggcggcgtgcctaacacatgcaagtcgaacggagtatattcgctgcagagatttcggtcgaagcttgagtatacttagtggcggacgggtgagtaacgcgtgggcaacctgcctcatactgggggatagcagttggaaacgactgataaaaccgcataagcgcacggtaccgcatggtacagtgtgaaaaactcc

SEQ ID NO: 3984 - DNA, 225 bp, Unknown
  bacterial strain Ascusb_4338 encodes 16S rRNA
agagtttgatcatggctcaggatgaacgctagcggcaggcttaacacatgcaagtcgaggggcagcgcggatagcaatatctggcggcgaccggcgaaagggtgcgtaacgcgtgagcaacttgcccgtatctgggggataagcggtggaaacgccgtctaataccccataacaacagaggccgcatgacctttgtttgaaagcttcggtggatacggataggct

SEQ ID NO: 3985 - DNA, 225 bp, Unknown
  bacterial strain Ascusb_370 encodes 16S rRNA
agagtttgatcatggctcaggatgaacgctagctacaggcttaacacatgcaagtcgaggggcagcggggtcttagcttgctaagactgccggcgaccggcgcacgggtgagtaacgcgtatccaaccttccccttagtagggcatagcccgtagaaatgcggattaataccctatgttcttcgtcgatggcatctgaagtgaagcaaaggtttaccgctaaggg

SEQ ID NO: 3986 - DNA, 225 bp, Unknown
  bacterial strain Ascusb_8042 encodes 16S rRNA
agagtttgatcatggctcaggataaacgctagcggcaggcctaacacatgcaagtcgagcggcagcacgaagtagcaatattttggtggcgagcggcggacgggtgagtaacgcgtatgcaacctgcccgcaacacggagatagccgaccgaaaggacgattaaactccgatagtatcatttggcggcatcgcttgatgattaaatattcataggttgcggatgg

SEQ ID NO: 3987 - DNA, 225 bp, Unknown
  bacterial strain Ascusb_3031 encodes 16S rRNA
agagtttgatcatggctcaggatgaacgctagcgacaggcttaacacatgcaagtcgaggggcagcgcggaggtagcaatacttctggcggcgaccggcgcactggtgagtaacacgtatgcgacctgccccggacagggggataaacccgggaaactgggcctaataccccatatgcctggaggatgcatgtcctctaggtgaaagatccgtcggtccgggatg

SEQ ID NO: 3988 - DNA, 225 bp, Unknown
  bacterial strain Ascusb_927 encodes 16S rRNA
agagtttgatcatggctcaggatgaacgctagctacaggcttaacacatgcaagtcgaggggcagcatgatcttagcttgctaagattgatggcgaccggcgcacgggtgagtaacgcgtatccaaccttccctgtactaggggatagcccggcgaaagtcggattaataccctatgttttccgaagcgagcatttaatttggaacaaaggtttaccggtatagg

SEQ ID NO: 3989 - DNA, 225 bp, Unknown
  bacterial strain Ascusb_691 encodes 16S rRNA
agagtttgatcatggctcaggatgaacgctggcggcgtgcctaacacatgcaagtcgaacggagatatatttgacagaagcttcggcagaaagattatatatcttagtggcggacgggtgagtaacgcgtggggaacctgccctgtactgggggataacagtgagaaatcactgctaaaaccgcataagcgcacactggcgcatgccagagtgtgaaaaactccg

SEQ ID NO: 3990 - DNA, 225 bp, Unknown
  bacterial strain Ascusb_4054 encodes 16S rRNA
agagtttgatcctggctcaggatgaacgctggcggcgtgcctaacacatgcaagtcgaacggttaagccggcttcggccgggaatacagtggcgaacgggtgagtaacacgtgaccaacctgccccctcctccgggacagcctcgggaaaccgggattaataccggatactccgcgcgcaccgcatggagcgcgcgggaaagcccaagcgggaggggatggggtc

SEQ ID NO: 3991 - DNA, 225 bp, Unknown
  bacterial strain Ascusb_13183 encodes 16S rRNA
agagtttgatcctggctcaggacgaacgctggcggcgtgcctaacacatgcaagtcgagcggggacacacagtgaagaggaagttttcggatggaattggaacggtatgttctagcggcggacgggtgagtaacgcgtgagcaacctgtccttcacagggggataacacagcgaaagttgtactaataccgcataagaccacgggaccgcatggttttggggtca

SEQ ID NO: 3992 - DNA, 225 bp, Unknown
  bacterial strain Ascusb_7502 encodes 16S rRNA
agagtttgatcctggctcaggatgaacgctagctacaggcttaacacatgcaagtcgaggggcagcatgctggtagcttgctatcagcgatggcgaccggcgcacgggtgcgtaacacgtatccaatctacccatggctcggggatagcctttcgaaagaaagattaatacccgatggtctgtttgtgagacatctcgcgagcagtaaagattcatcggcgatgg

SEQ ID NO: 3993 - DNA, 225 bp, Unknown
  bacterial strain Ascusb_9710 encodes 16S rRNA
agagtttgatcctggctcaggatgaacgctagctacaggcttaacacatgcaagtcgaggggcagcatggaggttgcttgcaacttctgatggcgaccggcgcacgggtgagtaacgcgtatccaaccttccccatagtagaggatagcccggcgaaagtcggattaatactctatgttcttcgttgaggacatctgaaatgaagcaaagatttatcgctatggg

SEQ ID NO: 3994 - DNA, 225 bp, Unknown
  bacterial strain Ascusb_21636 encodes 16S rRNA
agagtttgatcctggctcaggacgaacgctggcggcgtgcttaacacatgcaagtcgaacggggattaagttggaaaggcttcggcccggaagacataattcgagtggcggacgggtgagtaacgcgtgagcaacctgtcccagacagggggataacacttggaaacaggtgctaataccgcataagaccacggggtcacatggctctggggtaaaaggagcaat

SEQ ID NO: 3995 - DNA, 225 bp, Unknown
  bacterial strain Ascusb_2736 encodes 16S rRNA
agagtttgatcatggctcaggatgaacgctagctacaggcttaacacatgcaagtcgaggggcagcaggacgatagcttgctattgttgctggcgaccggcgcacgggtgagtaacgcgtatccaaccttccccttagtagggaatagcccggtgaaaatcggattaatgccctatgttcttcacagcggacatctaacgtgaagcaaagattcatcgctaaggg

SEQ ID NO: 3996 - DNA, 225 bp, Unknown
  bacterial strain Ascusb_2150 encodes 16S rRNA
agagtttgatcatggctcaggatgaacgctggcggcgtgcttaacacatgcaagtcgaacgaggttaattattacgatttccttcggggatgacgatttttaaccgagtggcggacgggtgagtaacgcgtgggcaacctgccccatacagggggataacagttggaaacgactgacaataccgcataagcgcacagtatcgcatggtacggtgtgaaaaactcc

SEQ ID NO: 3997 - DNA, 225 bp, Unknown
  bacterial strain Ascusb_10252 encodes 16S rRNA
agagtttgatcctggctcagaacgaacgctggcggcgcgtcttaagcatgcaagtcgaatggcaagatctgtgcttgcacaggtcctagaatggcggactggtgagtaacgcgtgggtgacgtaccttccggatggggatagctcctggaaacaggagataataccgaatacgatacacgggaacagaggccgtgtatgaaaggatcttttgattcgccggaaga

SEQ ID NO: 3998 - DNA, 225 bp, Unknown
  bacterial strain Ascusb_2855 encodes 16S rRNA
agagtttgatcatggctcaggatgaacgctggcggcgtgcctaacacatgcaagtcgaacgaagcgcctcgcccgacgaagtggagtgcttgcacaaagcagaatcaattgaggcgacttagtggcggacgggtgagtaacgcgtgggtaacctgccgtatgcagggggataacagttagaaatgactgctaataccgcataagcgcacagtatcgcatgataca

SEQ ID NO: 3999 - DNA, 225 bp, Unknown
  bacterial strain Ascusb_2899 encodes 16S rRNA
agagtttgatcatggctcaggacgaacgctggcggcacgcttaacacatgcaagtcgaacggtgaaggtagcttgctaccggatcagtggcggacgggtgagtaacacgtgagcaatctgcctttaagtggggaataacgattggaaacgatcggtaataccgcataatatactttttccgcatgaaaagagtatcaaagatttatcgcttaaagatgagctcgc

SEQ ID NO: 4000 - DNA, 225 bp, Unknown
  bacterial strain Ascusb_5908 encodes 16S rRNA
agagtttgatcatggctcaggatgaacgctggcggcgtgcctaatacatgcaagtcgaacgagggtgcttgcaccctagtggcgaacgggtgagtaacacgtaggtaacctgccttacagtttgggatacccgagggaaaccttggctaataccgaataattggctcggaggcatctctgagtcctaaaaggggcctttaaagcctcgctgaaagatggacctgc

SEQ ID NO: 4001 - DNA, 225 bp, Unknown
  bacterial strain Ascusb_4445 encodes 16S rRNA
agagtttgatcatggctcagaacgaacgctggcggcgcgtcttaagcatgcaagtcgagcggtaagattggtgcttgcactaatcctagagcggcggactggtgagtaacgcgtgggtgacgtacccttatgacggggacagctcctagaaataggagataataccggatacgctgtatgttgtcagaggacatacaggaaaggttcttttgaatcgcataagga

SEQ ID NO: 4002 - DNA, 225 bp, Unknown
  bacterial strain Ascusb_2893 encodes 16S rRNA
agagtttgatcatggctcaggatgaacgctggcggcgtgcctaacacatgcaagtcgagcgagaaatacttgattgaaacttcggtagatagaaagtatggaaagcggcggacgggtgagtaacgcgtaggcaacctgccccttacacagggatagccattggaaacgatgattaaaacctgatgacaccgagagatgacatcttctttcggtcaaagatttatc

SEQ ID NO: 4003 - DNA, 225 bp, Unknown
  bacterial strain Ascusb_393 encodes 16S rRNA
agagtttgatcatggctcaggatgaacgctggcggcgtgtttaacacatgcaagtcgagcgagaagtttctcagtagattcttcggatgatacagagttacggaaagcggcggacgggtgagtaacgcgtaggcaacctgccctctgcagagggatagcctcgggaaaccgggattaaaacctcataatgcgcgaccgggacatcccggatgcgccaaagattta

SEQ ID NO: 4004 - DNA, 225 bp, Unknown
  bacterial strain Ascusb_7144 encodes 16S rRNA
agagtttgatcctggctcaggatgaacgctggcggcgtgcttaacacatgcaagtcgaacgaagcatccctatcgacaaagtggacgtgcttgcacagaagcggagtcacctgggatgactgagtggcggacgggtgagtaacgcgtgggcaacctgccccatagagggggacaacagttagaaatgactgctaataccgcatagtaaagcagatccgcatgctt

SEQ ID NO: 4005 - DNA, 225 bp, Unknown
  bacterial strain Ascusb_4299 encodes 16S rRNA
agagtttgatcatggctcaggatgaacgctggcggcgtgcctaacacatgcaagtcgagcgagaaactcatgaccaatacttcggttgcgtgattgagcggaaagcggcggacgggtgagtaacgcgtaggcaacctgccccttgcagagggatagcctcgggaaaccgggattaaaacctcataacgcagcggtaagacatcttactgctgccaaagatttatc

SEQ ID NO: 4006 - DNA, 225 bp, Unknown
  bacterial strain Ascusb_489 encodes 16S rRNA
agagtttgatcatggctcaggatgaacgctagcggcaggcttaacacatgcaagtcgaggggtaacgcgaggtagcaatactttggcgacgaccggcgcacgggtgcgtaacgcgtatgcaacctacctgtaacaggggtataacggggtgaaaatcccactaatcccccatattgttaaagaatcgcatgtttctttaacgaaagcttcggtggttacggatgg

SEQ ID NO: 4007 - DNA, 225 bp, Unknown; identical to SEQ ID NO: 3374
  bacterial strain Ascusb_2306 encodes 16S rRNA

SEQ ID NO: 4008 - DNA, 225 bp, Unknown
  bacterial strain Ascusb_366 encodes 16S rRNA
agagtttgatcctggctcaggatgaacgctggcggcgcgcttaacacatgcaagtcgaacggttaaagcaccttcgggtgtgaataaagtggcgaacggctgagtaacacgtgggcaacctgcccctcgcaccgggatagcctcgggaaaccgtgggtaataccggatactccggcccccccgcatggcggggccgggaaagcgtacacggcgggggatgggccc

SEQ ID NO: 4009 - DNA, 225 bp, Unknown
  bacterial strain Ascusb_9708 encodes 16S rRNA
agagtttgatcatggctcaggatgaacgctagctacaggcttaacacatgcaagtcgaggggcagcattatcgaagcttgctttgatagatggcgaccggcgcacgggtgcgtaacacgtatccaatctacccatggctcagggatagcctttcgaaagaaagattaatacctgatggtctgtgattgagacatctcgaacacagtaaagatttatcggcgatgg

SEQ ID NO: 4010 - DNA, 225 bp, Unknown
  bacterial strain Ascusb_2905 encodes 16S rRNA
agagtttgatcatggctcaggatgaacgctggcggcaggcttaatacatgcaagtcgaacggtaaggccgagcgtagcaatacgcgaggtacacgagtggcgcacgggtgcgtaacgcgtatgcaacctgcccccgaccgggacaaaacagctggaaacggctgctaatatcccatggttaccgaggagggcatcctcctttgtataaagattcattggtcgggg

SEQ ID NO: 4011 - DNA, 225 bp, Unknown
  bacterial strain Ascusb_4366 encodes 16S rRNA
agagtttgatcatggctcagaacgaacgctggcggcgcgtcttaagcatgcaagtcgagcggtaagattggtgcttgcactaatcctagagcggcggactggtgagtaacgcgtgggtgacgtacctttgtgacggggacagctcctagaaataggagataataccggatacgctgcagcatgtcagaggtgctgcaggaaaggatcttttgattcgcacagaga

SEQ ID NO: 4012 - DNA, 225 bp, Unknown
  bacterial strain Ascusb_3867 encodes 16S rRNA
agagtttgatcatggctcaggatgaacgctggcggcgcgcttaacacatgcaagtcgaacggttaaagcacctccgggtgtgcataaagtggcgaacggctgagtaacacgtgggcaacctgccccccgcaccgggatagcctcgggaaaccgtgggtaataccggatactccctcccccccgcatggcggggaggggaaagcgtacacggcgggggatgggccc

SEQ ID NO: 4013 - DNA, 225 bp, Unknown
  bacterial strain Ascusb_1703 encodes 16S rRNA
agagtttgatcatggctcaggatgaacgctggcggcgtgcctaatacatgcaagtcgagcgagaatctgatgaacggagattcgtcgaagcgaatcagaggaaagcggcggacgggtgagtaacgcgtaggcaacctgcccttagcagagggatagccattggaaacgatgattaaaacctcataatgctgtctatacacatgtagagacagccaaagatttatc

SEQ ID NO: 4014 - DNA, 225 bp, Unknown
  bacterial strain Ascusb_15950 encodes 16S rRNA
agagtttgatcatggctcagaatgaacgttggcggcgtggattaggcatgcaagtcgagcggcaaggttattatcttcggattttagaccctagagcggcgaaagggataggaacgtatagatacatgcctcttagctcaggatagcgtctggaaacgggcgataatactgaatgaggtctccggaccaaaggtgtgattccgctaggagattggtctatatcct

SEQ ID NO: 4015 - DNA, 225 bp, Unknown
  bacterial strain Ascusb_12834 encodes 16S rRNA
agagtttgatcatggctcaggatgaacgctagctacaggcttaacacatgcaagtcgaggggcagcgagaagaaagcttgctttctttgtcggcgaccggcgcacgggtgagtaacgcgtatccaaccttccccttagtagggcatagcccggcgaaagtcggattaataccctatgttcttcgtagaggacatctgaaatgaagcaaagacttgtcgctaaggg

SEQ ID NO: 4016 - DNA, 225 bp, Unknown
  bacterial strain Ascusb_2167 encodes 16S rRNA
agagtttgatcatggctcagaacgaacgctggcggcaggtcttaggcatgcaagtcgaacggatgacaagagagcttgctctcttgaagtcagtggcgcacgagtgagtaacgcgtgggaaactgcccttcactggggaataacgtctggaaacggacgctaataccgcatacgcccgcaaggggaaagatttatcggtgatggatgtgcccgcgttggattagc

SEQ ID NO: 4017 - DNA, 225 bp, Unknown
  bacterial strain Ascusb_2842 encodes 16S rRNA
agagtttgatcatggctcaggacgaacgctggcggcgtgcctaacacatgcaagtcgagcgaggatatattttatgagagcttcggcaggaatgagagatattcgagcggcggacgggtgagtaacgcgtgaacaatctgtccctgacagggggataccacttggaaacaggtgctaataccgcataagaccacagcgtcgcatggcgcaggggtcaaaggagag

SEQ ID NO: 4018 - DNA, 225 bp, Unknown
  bacterial strain Ascusb_21571 encodes 16S rRNA
agagtttgatcctggctcaggatgaacgctagctacaggcttaacacatgcaagtcgaggggcagcgagaagaaagcttgctttctttgtcggcgaccggcgcacgggtgagtaacgcgtatccaaccttccccttagtagaggatagcccggcgaaagtcggattaatactctatgttctttctggatggcatctgatggaaagcaaaggtttaccgctaaggg

SEQ ID NO: 4019 - DNA, 225 bp, Unknown
  bacterial strain Ascusb_8252 encodes 16S rRNA
agagtttgatcatggctcaggatgaacgctagcggcaggcttaacacatgcaagtcgaggggcagcggggagtagcaatactctgccggcgaccggcgaaagggtgcgtaacgcgtgaacaatctgcccgtatccgggacataagcgatggaaacgtcgtctaatttcccataacaacaggagccgcatgacttttgtttgaaagatccgtcggatacggatgag

SEQ ID NO: 4020 - DNA, 225 bp, Unknown
  bacterial strain Ascusb_5361 encodes 16S rRNA
agagtttgatcatggctcaggacgaacgctggcggcgtgcttaacacatgcaagtcgaacgaagctgggagaaagatttcttcggaatgaattcttctaagactgagtggcggacgggtgagtaacgcgtgagcaacctgcccttcggagggggatagtgtctggaaacggacagtaataccgcataacgtacagatacggcatcgtgactgtaccaaagattta

SEQ ID NO: 4021 - DNA, 225 bp, Unknown
  bacterial strain Ascusb_544 encodes 16S rRNA
agagtttgatcctggctcaggatgaacgctagctacaggcttaacacatgcaagtcgaggggcagcatgaagtttgcttgcaaactttgatggcgaccggcgcacgggtgagtaacgcgtatccaaccttccctatagtagaggatagcccggcgaaagtcggattaatactctatgttttccaatgcagacatctaaaatggaacaaaggtttaccgctatagg

SEQ ID NO: 4022 - DNA, 225 bp, Unknown
  bacterial strain Ascusb_3745 encodes 16S rRNA
agagtttgatcctggctcagaacgaacgctggcggcgcgtcttaagcatgcaagtcgagcgggattcatgtgcttgcacatgatgagagcggcggactggcgaggagcgcgtgggcgacgcgccccccggactggaacagcccgtggaaacacggggtaatgccggacggcatgcggagtttggagactccgcatcaaaggggcttcggccccgccgggggagcg

SEQ ID NO: 4023 - DNA, 225 bp, Unknown
  bacterial strain Ascusb_1907 encodes 16S rRNA
agagtttgatcctggctcaggatgaacgctggcggcgtgcctaatacatgcaagtcgaacggcagtagcaatactgtagtggcgaacgggtgagtaacacgttggtgacctgccccaaagatgggaatatcacctggaaacgggtggcaaaaccgaataagcttatactgattagaaaggtataagtaaaagtgcaaactactttgggaggggcctgcggcccat

SEQ ID NO: 4024 - DNA, 225 bp, Unknown
  bacterial strain Ascusb_4016 encodes 16S rRNA
agagtttgatcctggctcaggatgaacgctagctacaggcttaacacatgcaagtcgaggggcagcaggatctgtgcttgcacaggttgctggcgaccggcgcacgggtgagtaacgcgtatccaaccttccccttagtagggcatagcccgtagaaatgcggattaataccctatgttttccgatgcagacatctaatttggaataaaggtttaccgctaaggg

SEQ ID NO: 4025 - DNA, 225 bp, Unknown
  bacterial strain Ascusb_749 encodes 16S rRNA
agagtttgatcatggctcaggacgaacgctggcggcatgcctaacacatgcaagtcgaacgaagttaagaagcttgctttttaacttagtggcggacgggtgagtaacgcgtgagcaacctgcctctaagtggggaataatgtactgaaaaggacactaataccgcataacatattggaagcgcatgattctgatatcaaagatttatcgcttagagatgggctc

SEQ ID NO: 4026 - DNA, 225 bp, Unknown
  bacterial strain Ascusb_1073 encodes 16S rRNA
agagtttgatcatggctcaggatgaacgctagctacaggcttaacacatgcaagtcgaggggcagcatgttggttgcttgcaaccgatgatggcgaccggcgcacgggtgcgtaacgcgtatccaatctgccctgtgctcggggatagccttgcgaaagtaagattaacacccgatggtctccttggcccgcatggtccttggagtaaagtttcacggcacggga

SEQ ID NO: 4027 - DNA, 225 bp, Unknown
  bacterial strain Ascusb_5329 encodes 16S rRNA
agagtttgatcctggctcaggatgaacgctagcggcaggcttaacacatgcaagtcgaggggcagcgcgggagtagcaatacttctggcggcgaccggcgcaagggtgcgtaacgcgtgagcgacatgcccgtgaccgggggataaccgatggaaacgtcgcctaatcccccataacatgattggtcgcatggccaatgattgaaaactccggtggtcacggatt

SEQ ID NO: 4028 - DNA, 225 bp, Unknown
  bacterial strain Ascusb_6360 encodes 16S rRNA
agagtttgatcctggctcaggatgaacgctggcggcgtgcctaacacatgcaagtcgaacggagatttgacgcttccgaagcttcggcagaggattgttaaatcttagtggcggacgggtgagtaacgcgtgggcaacctgcctcatactgggggataacagctggaaacgactgttaataccgcataagcgcacggtgtcgcatgacacagtgtgaaaaactcc

SEQ ID NO: 4029 - DNA, 225 bp, Unknown
  bacterial strain Ascusb_7389 encodes 16S rRNA
agagtttgatcctggctcaggatgaacgctagctacaggcttaacacatgcaagtcgaggggcagcatgggagttgcttgcaattcctgatggcgaccggcgcacgggtgagtaacgcgtatccaaccttccccttagtagggcatagcccggtgaaaatcggattaataccctatgttcttcacagcagacatctaacgtgaagcaaaggttcaccgctaaggg

SEQ ID NO: 4030 - DNA, 225 bp, Unknown
  bacterial strain Ascusb_6421 encodes 16S rRNA
agagtttgatcatggctcaggatgaacgctagctacaggcttaacacatgcaagtcgaggggcagcatgatcaaagcttgctttgattgatggcgaccggcgcacgggtgcgtaacgcgtatccaacctgccatgtactccgggatagccctctgaaaggaggattaataccggatgtggttgttcgaggacatcctcttacaattaaagatttatcggtacatc

SEQ ID NO: 4031 - DNA, 225 bp, Unknown
  bacterial strain Ascusb_4478 encodes 16S rRNA
agagtttgatcctggctcaggatgaacgctagcgacaggcctaacacatgcaagtcgagcggcagcacctcgggtggcgagcggcgcacgggtgagtaacgcgtatgtaacctgcccatgagtgggggatagcccggtgaaaaccggattaataccgcataacaccgatatctgacatcaaagatcggttaaagattcattgctcatggatggacatgcgttgga

SEQ ID NO: 4032 - DNA, 225 bp, Unknown
  bacterial strain Ascusb_3739 encodes 16S rRNA
agagtttgatcatggctcaggatgaacgctggcggcgtgcctaacacatgcaagtcgagcgggaatcgaccaactgaagcttcggcagaaggaagttgaggagagcggcggacgggtgagtaacgcgtaggtaacctaccttatgcacagggatagccccgggaaactggaattaatacctgataacgcggtgatatcacatggtattatcgccaaagatttatc

SEQ ID NO: 4033 - DNA, 225 bp, Unknown
  bacterial strain Ascusb_579A encodes 16S rRNA
agagtttgatcctggctcaggacgaacgctggcggcgtgcttaacacatgcaagtcgaacggagaacttatttcggtaagttcttagtggcgaacgggtgagtaacgcgtaggcaacctgccctccagttggggacaacattccgaaagggatgctaataccgaatacgatgggtttcccgcatgaggaacccatgaaaggcgctttcgggcgtcgctggaagat

SEQ ID NO: 4034 - DNA, 225 bp, Unknown
  bacterial strain Ascusb_2295A encodes 16S rRNA
agagtttgatcctggctcaggatgaacgctagctacaggcttaacacatgcaagtcgaggggcagcatgaaggaagcttgcttcctttgatggcgaccggcgcacgggtgagtaacgcgtatccaacctgcccattacactgggatagcccgccgaaaggcgaattaatcccggatagtgttcttagatggcatcagacaaggactaaaggtattttccggtaat

SEQ ID NO: 4035 - DNA, 225 bp, Unknown
  bacterial strain Ascusb_2143B encodes 16S rRNA
agagtttgatcatggctcaggacgaacgctggcggcgtgcctaatacatgcaagtcgagcgagcttgcctagatgattttagtgcttgcactaaatgaaactagatacaagcgagcggcggacgggtgagtaacacgtgggtaacctgcccaagagactgggataacacctggaaacagatgctaataccggataacaacactagacgcatgtctagagtttgaa

SEQ ID NO: 4036 - DNA, 225 bp, Unknown
  bacterial strain Ascusb_124A encodes 16S rRNA
agagtttgatcatggctcaggatgaacgctggcggcgtgcctaacacatgcaagtcgagcgatgaataaaccgacaaggtttcggccaaggaagtttattcagagcggcggatgggtgaggaacgcgtggggaacctgcctttcaccgggggataccagctggaaacggctgttaataccgcatatgctcacagtgccgcatggcacagggaggaaaactccggt

SEQ ID NO: 4037 - DNA, 225 bp, Unknown; identical to SEQ ID NO: 4036
  bacterial strain Ascusb_3851B encodes 16S rRNA

SEQ ID NO: 4038 - DNA, 225 bp, Unknown; identical to SEQ ID NO: 2887
  bacterial strain Ascusb_7126A encodes 16S rRNA

SEQ ID NO: 4039 - DNA, 225 bp, Unknown
  bacterial strain Ascusb_2255B encodes 16S rRNA
agagtttgatcatggctcaggatgaacgctagctacaggcttaacacatgcaagtcgaggggaaacggcagagaagcttgcttttctggacgtcgaccggcgaatgggtgagtaacgcgtatccaacctgcccctaagtagggaatagccttgcgaaagtaagattaatgccctatgttgtctttcgatcacatgagaagaagactaaaggtttaccgcttaggg

SEQ ID NO: 4040 - DNA, 225 bp, Unknown
  bacterial strain Ascusb_845A encodes 16S rRNA
agagtttgatcatggctcaggatgaacgctagctacaggcttaacacatgcaagtcgaggggaaacgatattgaaagcttgctttctttaggcgtcgaccggcgaatgggtgagtaacgcgtatccaacctgcccctgagtaagggatagcccatcgaaagatggattaataccttatggtctcctttgaaggcatcggattaggagtaaagatttatcgctgag

SEQ ID NO: 4041 - DNA, 225 bp, Unknown
  bacterial strain Ascusb_223B encodes 16S rRNA
agagtttgatcctggctcaggacgaacgctggcggcgtgcctaatacatgcaagtagaacgctgaagactttagcttgctaaagttggaagagttgcgaacgggtgagtaacgcgtaggtaacctgcctactagcgggggataactattggaaacgatagctaataccgcataacagcatttaacacatgttagatgcttgaaaggagcaattgcttcactagta

SEQ ID NO: 4042 - DNA, 225 bp, Unknown
  bacterial strain Ascusb_15705A encodes 16S rRNA
agagtttgatcctggctcaggacgaacgctggcggcgtgcttaacacatgcaagtcgagcggaaaggccccttcgggggtactcgagcggcgaacgggtgagtaacacgtgagcaacctgcccctgacactgggataagcctgggaaaccgggtctaataccggatatgacctgcctccgcatgggggtgggtggaaaggttggcccgtttgggtcttccggtca

SEQ ID NO: 4043 - DNA, 225 bp, Unknown; identical to SEQ ID NO: 4042
  bacterial strain Ascusb_9859A encodes 16S rRNA

SEQ ID NO: 4044 - DNA, 225 bp, Unknown; identical to SEQ ID NO: 4042
  bacterial strain Ascusb_12147A encodes 16S rRNA

SEQ ID NO: 4045 - DNA, 225 bp, Unknown; identical to SEQ ID NO: 4042
  bacterial strain Ascusb_9658A encodes 16S rRNA

SEQ ID NO: 4046 - DNA, 225 bp, Unknown
  bacterial strain Ascusb_17947C encodes 16S rRNA
agagtttgatcctggctcaggacgaacgctggcggcatgcctaatacatgcaagtcgaacgagcttccgttgattgacgtgcttgcactgatttcaacattgaagcgagtggcgaactggtgagtaacacgtgggaaatctgcccagaagcaggggataacacttggaaacaggtgctaataccgtataacaacaaaaaccgcatggtttttgtttgaaaggtgg

SEQ ID NO: 4047 - DNA, 225 bp, Unknown; identical to SEQ ID NO: 4046
  bacterial strain Ascusb_21C encodes 16S rRNA

SEQ ID NO: 4048 - DNA, 225 bp, Unknown
  bacterial strain Ascusb_1379A encodes 16S rRNA
agagtttgatcatggctcaggatgaacgctggcggcgtgcctaatacatgcaagtcgaacgcactgacgtcgactgaagctgcttgcagtggaagtcgatcgacgtgagtggcggacgggtgagtaacacgtgggtaacctacccttaagtgggggataacatttggaaacagatgctaataccgcataaccatacagaccacatggtctgtatgtaaaagatgg

SEQ ID NO: 4049 - DNA, 225 bp, Unknown
  bacterial strain Ascusb_11080B encodes 16S rRNA
agagtttgatcctggctcaggacgaacgctggcggcgtgcctaatacatgcaagtcgagcggacttgatggagagcttgctctccagagagttagcggcggacgggtgagtaacacgtaggcaacctgcctgtaagactgggataactagcggaaacgttagctaataccggataatttattttctcgcatgaggagataatgaaagacggagcaatctgtcact

SEQ ID NO: 4050 - DNA, 225 bp, Unknown
  bacterial strain Ascusb_1411A encodes 16S rRNA
agagtttgatcatggctcaggatgaacgctggcggcgtgcctaacacatgcaagtcgaacgagggtgcttgcaccctagtggcgaacgggtgagtaacacgtaggtaacctgcctttaagcttgggatacccagaggaaactttggctaataccggataacaatggaagaggcatctcttctatttaaaaggcccgtatgggtcacttaaagatggacctgcggc

SEQ ID NO: 4051 - DNA, 225 bp, Unknown; identical to SEQ ID NO: 4039
  bacterial strain Ascusb_3855A encodes 16S rRNA

SEQ ID NO: 4052 - DNA, 225 bp, Unknown
  bacterial strain Ascusb_4938A encodes 16S rRNA
agagtttgatcatggctcagaacgaacgctggtggcgtgtcttatacatgcaagtcgagcggtgcagcaatgcatagcggcgaacgggtgagtaacgcgtaagcaatctgccccatgcccgggaatagccgtgccaacgcgcgggtaataccggatatagtggctccctgcatagggagttgacgaaagatttatcggcatgggatgagcttgcgtccgattagc

SEQ ID NO: 4053 - DNA, 225 bp, Unknown
  bacterial strain Ascusb_4492C encodes 16S rRNA
agagtttgatcatggctcaggatgaacgctagctacaggcttaacacatgcaagtcgaggggcagcattgtcgaagcttgctttgacagatggcgaccggcgcacgggtgagtaacgcgtatccaaccttccccatagtagggcatagcccgtagaaatgcggattaataccctatgttttccgaagaagacatctgatttggaacaaaggttcaccgctatggg

SEQ ID NO: 4054 - DNA, 225 bp, Unknown; identical to SEQ ID NO: 4053
  bacterial strain Ascusb_2612C encodes 16S rRNA

SEQ ID NO: 4055 - DNA, 225 bp, Unknown
  bacterial strain Ascusb_445B encodes 16S rRNA
agagtttgatcctggctcaggatgaacgctagctacaggcttaacacatgcaagtcgaggggcagcatgaggtcagcttgctgactttgatggcgaccggcgcacgggtgcgtaacacgtatccaatctgcccgttacccggggatagcctttcgaaagaaagattaatacccgatggcttcacaccgccgcatggcgttgtgaataaagattcatcggtaacgg

SEQ ID NO: 4056 - DNA, 225 bp, Unknown
  bacterial strain Ascusb_1590A encodes 16S rRNA
agagtttgatcatggctcaggatgaacgctggcggcgtgcttaacacatgcaagtcgaacgaagcaacttattacgatcccttcggggtgacgatttgttgactgagtggcggacgggtgagtaacgcgtgggtaacctaccttgtacagggggataacagttggaaacgactgctaataccgcataagcgcacagcttcgcatgaagcagtgtgaaaagttttt

SEQ ID NO: 4057 - DNA, 225 bp, Unknown
  bacterial strain Ascusb_386B encodes 16S rRNA
agagtttgatcatggctcaggatgaacgctggcggcgtgcttaatacatgcaagtcgaacggatgaaggaagaaagcttgctttcttcccgattcagtggcgaacgggtgagtaatacgtaggcaacctgccccaaagcgggggatagcagttggaaacgactattaataccgcataggtaatagggaggcatctccttattattaaaggtgcgtttgcaccgct

SEQ ID NO: 4058 - DNA, 225 bp, Unknown; identical to SEQ ID NO: 4057
  bacterial strain Ascusb_1419B encodes 16S rRNA

SEQ ID NO: 4059 - DNA, 225 bp, Unknown
  bacterial strain Ascusb_221B encodes 16S rRNA
agagtttgatcatggctcaggatgaacgctagctacaggcttaacacatgcaagtcgaggggcagcagatcgaaagcttgcttttgatgctggcgaccggcgcacgggtgagtaacgcgtatccaaccttccctatagtagagaatagcccggcgaaagtcggattaatgctctatgttgtatttagaagacatctgaagaataccaaaggtttaccgctatagg

SEQ ID NO: 4060 - DNA, 225 bp, Unknown
  bacterial strain Ascusb_847B encodes 16S rRNA
agagtttgatcctggctcaggatgaacgctagctacaggcttaacacatgcaagtcgaggggcagcagatcgaaagcttgcttttgatgctggcgaccggcgcacgggtgagtaacgcgtatccaaccttccctatagtagagaatagcccggcgaaagtcggattaatgctctatgttgtatttagaagacatctgaagaataccaaaggtttaccgctatagg

SEQ ID NO: 4061 - DNA, 225 bp, Unknown
  bacterial strain Ascusb_466B encodes 16S rRNA
agagtttgatcctggctcaggacgaacgctggcggcgtgcctaatacatgcaagtcgaacgcattttctttcaccgtagcttgctacaccgaaagaaaatgagtggcgaacgggtgagtaacacgtgggtaacctgcccatcagcgggggataacacttggaaacaggtgctaataccgcataatttcatttactgcatggtagatggatgaaaggcgcttttgc

SEQ ID NO: 4062 - DNA, 225 bp, Unknown
  bacterial strain Ascusb_6214A encodes 16S rRNA
agagtttgatcatggctcaggatgaacgctagctacaggcttaacacatgcaagtcgaggggcagcagatcgaaagcttgcttttgatgctggcgaccggcgcacgggtgagtaacgcgtatccaaccttccctatagtagagaatagcccggcgaaagtcggattaatgctctatgttgtatttagaggacatctgaagaataccaaaggtttaccgctatagg

SEQ ID NO: 4063 - DNA, 225 bp, Unknown; identical to SEQ ID NO: 2059
  bacterial strain Ascusb_4975B encodes 16S rRNA

SEQ ID NO: 4064 - DNA, 225 bp, Unknown
  bacterial strain Ascusb_3349B encodes 16S rRNA
agagtttgatcctggctcaggatgaacgctagctacaggcttaacacatgcaagtcgaggggcagcaggacgatagcttgctattgttgctggcgaccggcgcacgggtgagtaacgcgtatccaaccttccctatagtagagaatagcccggcgaaagtcggattaatgctctatgttcttctttgatggcctctgatgagaagcaaagctttagcgctatagg

SEQ ID NO: 4065 - DNA, 225 bp, Unknown; identical to SEQ ID NO: 1741
  bacterial strain Ascusb_7502A encodes 16S rRNA

SEQ ID NO: 4066 - DNA, 225 bp, Unknown; identical to SEQ ID NO: 1393
  bacterial strain Ascusb_352B encodes 16S rRNA

SEQ ID NO: 4067 - DNA, 225 bp, Unknown
  bacterial strain Ascusb_262A encodes 16S rRNA
agagtttgatcatggctcaggatgaacgctagctacaggcttaacacatgcaagtcgaggggcagcatgatcaaagcttgctttgattgatggcgaccggcgcacgggtgagtaacgcgtatccaaccttccctatagtagaggatagcccggcgaaagtcggattaatactctatgttgtatttagaggacatctgaagaataccaaaggtttaccgctatagg

SEQ ID NO: 4068 - DNA, 225 bp, Unknown
  bacterial strain Ascusb_314A encodes 16S rRNA
agagtttgatcatggctcaggatgaacgctggcggtatgcctaatacatgcaagtcgaacgcattctcgtttttgattgaaggtgcttgcaccagattgaaaaaacattggaatgagtggcggacgggtgagtaacacgtgggtaacctgcccaaaagtgggggataacatttggaaacaaatgctaataccgcataatagttagaaccgcatggttctaatttg

SEQ ID NO: 4069 - DNA, 225 bp, Unknown; identical to SEQ ID NO: 3235
  bacterial strain Ascusb_4791B encodes 16S rRNA

SEQ ID NO: 4070 - DNA, 225 bp, Unknown
  bacterial strain Ascusb_479A encodes 16S rRNA
agagtttgatcatggctcagattgaacgctggcggcaggcctaacacatgcaagtcgaacggtaacaggaagcagcttgctgcttcgctgacgagtggcggacgggtgagtaatgtctgggaaactgcctgatggagggggataactactggaaacggtagctaataccgcataacgtcgcaagaccaaagagggggaccttcgggcctcttgccatcggatgtg

SEQ ID NO: 4071 - DNA, 225 bp, Unknown
  bacterial strain Ascusb_2965B encodes 16S rRNA
agagtttgatcctggctcaggatgaacgctagcgacaggcctaacacatgcaagtcgaggggcagcacttcgggtggcgaccggcgcacgggtgagtaacgcgtatgtaacctgcccttgagtgggggatagcccatcgaaagatggattaataccgcataaagccgcggatgaacatttattagcggccaaagatttattgctcagggatggacatgcgtatga

SEQ ID NO: 4072 - DNA, 225 bp, Unknown
  bacterial strain Ascusb_141B encodes 16S rRNA
agagtttgatcatggctcaggacgaacgctggcggcgtgcctaatacatgcaagtcgagcggacttgatggagagcttgctctcttgagagttagcggcggacgggtgagtaacacgtaggcaacctgcctgtaagactgggataactagcggaaacgttagctaataccggataatttattttctcgcatgaggagataatgaaagacggagcaatctgtcact

SEQ ID NO: 4073 - DNA, 225 bp, Unknown
  bacterial strain Ascusb_110A encodes 16S rRNA
agagtttgatcatggctcaggatgaacgctggcggcgtgcctaacacatgcaagtcgaacggtgatccattgatattttcggatggatttggatcatagtggcggacgggtgagtaacgcgtggataacctgcctctctctgggggatagcagctggaaacggctggtaataccgcataagaccacagagccgcatggctcagaggtaaaagatttatcggagag

SEQ ID NO: 4074 - DNA, 225 bp, Unknown
  bacterial strain Ascusb_3013B encodes 16S rRNA
agagtttgatcatggctcaggatgaacgctggcggcgtgcttaacacatgcaagtcgaacgaggttattacagttgaagttttcggatggaaaccgttttaaccgagtggcggacgggtgagtaacgcgtggggaacctgccccattccgggggataccagttggaaacgactgttaataccgcataagcgcacagtaccgcatggtacagtgtgaaaaactccg

SEQ ID NO: 4075 - DNA, 225 bp, Unknown
  bacterial strain Ascusb_8516A encodes 16S rRNA
agagtttgatcctggctcaggatgaacgctagctacaggcttaacacatgcaagtcgaggggcagcatgtcggtggcttgccaccgatgatggcgaccggcgcacgggtgcgtaacgcgtatccaaccttcccgcaagttggggatagcccggcgaaagtcggattaatacccgatgtggtgctttgaggacatctgattggcactaaaggcttgccgcttgcgg

SEQ ID NO: 4076 - DNA, 225 bp, Unknown; identical to SEQ ID NO: 4062
  bacterial strain Ascusb_714A encodes 16S rRNA

SEQ ID NO: 4077 - DNA, 225 bp, Unknown; identical to SEQ ID NO: 62
  bacterial strain Ascusb_1784B encodes 16S rRNA

SEQ ID NO: 4078 - DNA, 225 bp, Unknown; identical to SEQ ID NO: 62
  bacterial strain Ascusb_3047B encodes 16S rRNA

SEQ ID NO: 4079 - DNA, 225 bp, Unknown; identical to SEQ ID NO: 62
  bacterial strain Ascusb_2140A encodes 16S rRNA

SEQ ID NO: 4080 - DNA, 225 bp, Unknown
  bacterial strain Ascusb_2917A encodes 16S rRNA
agagtttgatcatggctcaggacgaacgctggcggcgtgcctaatacatgcaagtcgagcggacttgatggagagcttgctctccagagagttagcggcggacgggtgagtaacgcgtaggtaacctgcctactagcgggggataactattggaaacgatagctaataccgcataacagcatttaacccatgttagatgcttgaaaggagcaattgcttcactag

SEQ ID NO: 4081 - DNA, 225 bp, Unknown; identical to SEQ ID NO: 4080
  bacterial strain Ascusb_555A encodes 16S rRNA

SEQ ID NO: 4082 - DNA, 225 bp, Unknown
  bacterial strain Ascusb_1618B encodes 16S rRNA
agagtttgatcatggctcaggatgaacgctagctacaggcttaacacatgcaagtcgaggggtaacgatattgaaagcttgctttcgataggcgacgaccggcgcacgggtgagtaacgcgtatccaacctgcccataactaagggataatccgtagaaatgcggtctaataccttatgtgttccgacgaggacatctgaattggaataaagatttatcggttat

SEQ ID NO: 4083 - DNA, 225 bp, Unknown
  bacterial strain Ascusb_534B encodes 16S rRNA
agagtttgatcctggctcaggatgaacgctagctacaggcttaacacatgcaagtcgaggggtaacatgaagaaagcttgctttctttgatgacgaccggcgcacgggtgagtatcgcgtatccaacctgcccataagtagggaatagccttgcgaaagtaagattaatgccctatggtttccgttgaggacatctgagatggaataaagatttatcgcttatgg

SEQ ID NO: 4084 - DNA, 225 bp, Unknown; identical to SEQ ID NO: 4083
  bacterial strain Ascusb_1179C encodes 16S rRNA

SEQ ID NO: 4085 - DNA, 225 bp, Unknown
  bacterial strain Ascusb_1536B encodes 16S rRNA
agagtttgatcatggctcaggataaacgctggcggcgtgcctaatacatgcaagtcgatcggacgagttcaagcttgcttggacaaatcagaggcgaacgggtgagtaatacgtaagcaacctgcctgtaaggaacgggataacacctggaaacgggcgctaaaaccgtataggtaacggagaggcatctttctgttattaaaggttggaaacacaaacagatgg

SEQ ID NO: 4086 - DNA, 225 bp, Unknown
  bacterial strain Ascusb_132C encodes 16S rRNA
agagtttgatcctggctcaggatgaacgctggcggcgtgcctaatacatgcaagtcgagcgcgagcgttagaagcttgcttctaacaatcgagcggcggacgggtgagtaacacgtgggcaacctacctttgagattgggataactaccggaaacggtagctaataccggataggacatgattacataagtagtgatgttaaaaggcggatttatctgccgttca

SEQ ID NO: 4087 - DNA, 225 bp, Unknown
  bacterial strain Ascusb_1278A encodes 16S rRNA
agagtttgatcatggctcagattgaacgctggcggcaggcttaacacatgcaagtcgaacggtagcgggaagaaagcttgctttctttgccgacgagtggcggacgggtgagtaatgcttggggatctggcttatggagggggataacgacgggaaactgtcgctaataccgcgtaatatcttcggattaaagggtgggactttcgggccacctgccataagatg

SEQ ID NO: 4088 - DNA, 225 bp, Unknown
  bacterial strain Ascusb_654A encodes 16S rRNA
agagtttgatcatggctcaggatgaacgctggcggcgtgcctaacacatgcaagtcgaacggggttaagggaaattttcggatggaacttaacttagtggcggacgggtgagtaacgcgtggataacctgcctcacacagggggatagcagctggaaacggctggtaataccgcataagaccacgaccccgcatgggggtgtggtaaaagatttatcggtgtgag

SEQ ID NO: 4089 - DNA, 225 bp, Unknown
  bacterial strain Ascusb_221C encodes 16S rRNA
agagtttgatcatggctcaggacgaacgctggcggcgtgcctaatacatgcaagtcgagcgaatctttgggagcttgctcttttaagattagcggcggacgggtgagtaacacgtgggcaacctgcctgtaagacggggataactccgggaaaccggggctaataccggatgattcttctctgcacatgcagggaagctaaaagatggtttacgctatcgcttac

SEQ ID NO: 4090 - DNA, 225 bp, Unknown
  bacterial strain Ascusb_2191C encodes 16S rRNA
agagtttgatcatggctcaggatgaacgctggcggcgtgcctaacacatgcaagtcgaacggtggtccattgatattttcggatggatatggatcatagtggcggacgggtgagtaacgcgtggataacctgcctctctctgggggatagcagctggaaacggttggtaataccgcataagaccacagagccgcatgactcaggggtaaaagatttatcggagag

SEQ ID NO: 4091 - DNA, 225 bp, Unknown
  bacterial strain Ascusb_10267B encodes 16S rRNA
agagtttgatcctggctcaggacgaacgctggcggcgtgcctaatacatgcaagtcgagcggactaataggttcttcggaacctgttggttagcggcggacgggtgagtaacacgtaggcaacctgcccgtaagactgggataactaccggaaacggtagctaataccggatacgcaagtttctcgcatgggggacttgggaaaggcggagcaatctgtcactta

SEQ ID NO: 4092 - DNA, 225 bp, Unknown
  bacterial strain Ascusb_2897A encodes 16S rRNA
agagtttgatcatggctcaggacgaacgctggcggcgtgcttaacacatgcaagtcgaacggagaatttgcttcggtgaattcttagtggcgaacgggtgagtaacgcgtaggcaacctgccctctggttggggacaacattccgaaagggatgctaataccgaatgtgctcacacttccgcatggaggtgtgaggaaagatggcctctacttgtaagctatcgc

SEQ ID NO: 4093 - DNA, 225 bp, Unknown; identical to SEQ ID NO: 1725
  bacterial strain Ascusb_19701A encodes 16S rRNA

SEQ ID NO: 4094 - DNA, 225 bp, Unknown
  bacterial strain Ascusb_9898B encodes 16S rRNA
agagtttgatcatggctcaggatgaacgccggcggtgtgcctaatacatgcaagtcgaacgcgttggcccaactgattgaacgtgcttgcacggacttgacgttggtttaccaacgagtggcggacgggtgagtaacacgtaggtaacctgccccaaagcgggggataacatttggaaacagatgctaataccgcataacaatttgaatcgcatgattcaaattt

SEQ ID NO: 4095 - DNA, 225 bp, Unknown
  bacterial strain Ascusb_299B encodes 16S rRNA
agagtttgatcctggctcaggatgaacgctggcggcgtgcttaacacatgcaagtcgaacggagttaataagcggaagtcttcggatggaagcttgttaacttagtggcggacgggtgagtaacgcgtgggtaacctgccttatacagggggataacagccggaaacggttgctaataccgcataagcatacagtaccgcatggtacagtgtgaaaaagattaag

SEQ ID NO: 4096 - DNA, 225 bp, Unknown; identical to SEQ ID NO: 4095
  bacterial strain Ascusb_346B encodes 16S rRNA

SEQ ID NO: 4097 - DNA, 225 bp, Unknown
  bacterial strain Ascusb_1271A encodes 16S rRNA
agagtttgatcctggctcaggacgaacgctggcggcgtgcctaacacatgcaagtcgagcgaagtgcttattaggaaatcttcggatggaatgataagtatcttagcggcggatgggtgagtaacgcgtgaggaacctgccttctacaagggaatagcctcgggaaaccgggattaataccctatgacacttcttaatcgcatgattttgaagttaaagcgttag

SEQ ID NO: 4098 - DNA, 225 bp, Unknown
  bacterial strain Ascusb_3758C encodes 16S rRNA
agagtttgatcatggctcaggacgaacgctggcggcgtgcctaatacatgcaagtcgagcggacctgatggagtgcttgcactcctgatggttagcggcggacgggtgagtaacacgtaggcaacctgcccgtaagaccgggataactaccggaaacggtagctaataccggataatcaagcctctcgcatgagaagcttgggaaaggcggagcaatctgtcact

SEQ ID NO: 4099 - DNA, 225 bp, Unknown
  bacterial strain Ascusb_20B encodes 16S rRNA
agagtttgatcctggctcaggacgaacgctggcggcgtgcttaacacatgcaagtcgagcgatgaagcttccttcgggaagtggattagcggcggacgggtgagtaacacgtgggtaacctgcctcaaagtgggggatagccttccgaaaggaagattaataccgcataacataagagaatcgcatgattttcttatcaaagatttattgctttgagatggaccc

SEQ ID NO: 4100 - DNA, 225 bp, Unknown
  bacterial strain Ascusb_1989B encodes 16S rRNA
agagtttgatcctggctcaggacgaacgctggcggcgtgcctaatacatgcaagtcgagcggacttgatggagagcttgctctccagagggttagcggcggacgggtgagtaacacgtaggtaacctgcctgtaagactgggataactagcggaaacgttagctaataccggataatttattttctcgcatggggaagtaatgaaagacggagcaatctgtcact

SEQ ID NO: 4101 - DNA, 225 bp, Unknown; identical to SEQ ID NO: 4100
  bacterial strain Ascusb_132D encodes 16S rRNA

SEQ ID NO: 4102 - DNA, 225 bp, Unknown; identical to SEQ ID NO: 4100
  bacterial strain Ascusb_3718C encodes 16S rRNA

SEQ ID NO: 4103 - DNA, 225 bp, Unknown
  bacterial strain Ascusb_18A encodes 16S rRNA
agagtttgatcctggctcaggacgaacgctggcggcgtgcttaacacatgcaagtcgagcgatgaagcttccttcgggaggtggattagcggcggacgggtgagtaacacgtgggtaacctgcctcaaagtgggggatagccttccgaaaggaagattaataccgcataatataagagaatcgcatgattttcttatcaaagatttattgctttgagatggaccc

SEQ ID NO: 4104 - DNA, 225 bp, Unknown; identical to SEQ ID NO: 2143
  bacterial strain Ascusb_18B encodes 16S rRNA

SEQ ID NO: 4105 - DNA, 225 bp, Unknown
  bacterial strain Ascusb_2495A encodes 16S rRNA
agagtttgatcatggctcaggacgaacgctggcggcgtgcctaacacatgcaagtcgagcgaagttttcaaagcagatttcttcggattgaagctttgattatcttagcggcggacgggtgagtaacgcgtgagaaacctgcctttcacaaagggatagcctcgggaaactgggattaataccttatgatactaattcttcgcatgaagaattagtcaaagcgta

SEQ ID NO: 4106 - DNA, 225 bp, Unknown
  bacterial strain Ascusb_211C encodes 16S rRNA
agagtttgatcctggctcagattgaacgctggcggcaggcctaacacatgcaagtcgagcggtaacagaagaaagcttgctttcttgctgacgagcggcggacgggtgagtaatgtatggggatctgcccgatagagggggataactactggaaacggtggctaataccgcatgacgtctacggaccaaagcaggggctcttcggaccttgcgctatcggatgaa

SEQ ID NO: 4107 - DNA, 225 bp, Unknown; identical to SEQ ID NO: 4106
  bacterial strain Ascusb_310C encodes 16S rRNA

SEQ ID NO: 4108 - DNA, 225 bp, Unknown
  bacterial strain Ascusb_1924B encodes 16S rRNA
agagtttgatcatggctcaggacgaacgctggcggcgtgcctaatacatgcaagtcgagcggacctgatggagtgcttgcactcctgatggttagcggcggacgggtgagtaacacgtaggcaacctgcccgtaagaccgggataactaccggaaacggtagctaataccggatacgcaagtttctcgcatgggggacttgggaaaggcggagcaatctgtcact

SEQ ID NO: 4109 - DNA, 225 bp, Unknown; identical to SEQ ID NO: 4108
  bacterial strain Ascusb_8863B encodes 16S rRNA

SEQ ID NO: 4110 - DNA, 225 bp, Unknown; identical to SEQ ID NO: 4108
  bacterial strain Ascusb_1189B encodes 16S rRNA

SEQ ID NO: 4111 - DNA, 225 bp, Unknown; identical to SEQ ID NO: 4108
  bacterial strain Ascusb_2725B encodes 16S rRNA

SEQ ID NO: 4112 - DNA, 225 bp, Unknown
  bacterial strain Ascusb_2446B encodes 16S rRNA
agagtttgatcctggctcaggacgaacgctggcggcgtgcctaatacatgcaagtcgagcggagttaattaggagcttgctcttgattaacttagcggcggacgggtgagtaacacgtaggcaacctgcccgtaagactgggataactaccggaaacggtagctaataccggatacgcaagtttctcgcatgggagacttgggaaaggcggagcaatctgtcact

SEQ ID NO: 4113 - DNA, 225 bp, Unknown
  bacterial strain Ascusb_2900A encodes 16S rRNA
agagtttgatcctggctcagattgaacgctggcggcaggcctaacacatgcaagtcgaacggtaacaggaagcagcttgctgctttgctgacgagtggcggacgggtgagtaatgtctgggaaactgcccgatggagggggataactactggaaacggtagctaataccgcataatgtcgcaagaccaaagagggggaccttcgggcctcttgccatcggatgtg

SEQ ID NO: 4114 - DNA, 225 bp, Unknown
  bacterial strain Ascusb_2067A encodes 16S rRNA
agagtttgatcatggctcaggatgaacgctggcggcgtgcctaatacatgcaagtcgagcgaatggattaagagcttgctcttatgaagttagcggcggacgggtgagtaacacgtgggtaacctgcccataagactgggataactccgggaaaccggggctaataccggataatattttgaactgcatggttcgaaattgaaaggcggcttcggctgtcactta

SEQ ID NO: 4115 - DNA, 225 bp, Unknown
  bacterial strain Ascusb_1731B encodes 16S rRNA
agagtttgatcatggctcaggatgaacgctagcgacaggcttaacacatgcaagtcgaggggcagcgggcgagtggcaacacttgctgtcggcgaccggcgcactggtgagtaacacgtatgcaacctgcccccttctgggagataacccatagaaatgtggcctaatatcccatagtcggtccagccgcatggccgggccgggaaaggcgagccggaaggggat

SEQ ID NO: 4116 - DNA, 225 bp, Unknown
  bacterial strain Ascusb_1785B encodes 16S rRNA
agagtttgatcctggctcaggatgaacgctggcggcgtgcctaatacatgcaagtcgagcgaatggattaagagcttgctcttatgaagttagcggcggacgggtgagtaacacgtgggtaacctgcccataagactgggataactccgggaaaccggggctaataccggatgacattttgaactgcatggttcgaaattgaaaggcggcttcggctgtcactta

SEQ ID NO: 4117 - DNA, 225 bp, Unknown
  bacterial strain Ascusb_1906B encodes 16S rRNA
agagtttgatcatggctcaggacgaacgctggcggcgtgcttaacacatgcaagtcgaacgagacgattttaagcttgcttagatgagtcgagtggcaaacgggtgagtaacgcgtagacaacctgccgcaaagatggggacaacagtccgaaaggactgctaataccgaatgttgtgcaacctccgcatggaggatgcattaaagatggcctctacttgtaagc

SEQ ID NO: 4118 - DNA, 225 bp, Unknown; identical to SEQ ID NO: 4092
  bacterial strain Ascusb_115B encodes 16S rRNA

SEQ ID NO: 4119 - DNA, 225 bp, Unknown
  bacterial strain Ascusb_14159A encodes 16S rRNA
agagtttgatcatggctcaggacgaacgctggcggcgtgcctaatacatgcaagtcgagcggactttaaaagcttgcttttaaagttagcggcggacgggtgagtaacacgtgggcaacctgcctgtaagactgggataacttcgggaaaccggagctaataccggataatccttttcctctcatgaggaaaagctgaaagacggtttacgctgtcacttacaga

SEQ ID NO: 4120 - DNA, 225 bp, Unknown; identical to SEQ ID NO: 4119
  bacterial strain Ascusb_14763A encodes 16S rRNA

SEQ ID NO: 4121 - DNA, 225 bp, Unknown
  bacterial strain Ascusb_14918A encodes 16S rRNA
agagtttgatcatggctcagattgaacgctggcggcaggcttaacacatgcaagtcgaacggtagcgggaggaaagcttgctttctttgccgacgagtggcggacgggtgagtaatgcttggggatctggcttatggagggggataacgacgggaaactgtcgctaataccgcgtaatatcttcggattaaagggtgggactttcgggccacccgccataagatg

SEQ ID NO: 4122 - DNA, 225 bp, Unknown; identical to SEQ ID NO: 4091
  bacterial strain Ascusb_2188C encodes 16S rRNA

SEQ ID NO: 4123 - DNA, 225 bp, Unknown; identical to SEQ ID NO: 4091
  bacterial strain Ascusb_668B encodes 16S rRNA

SEQ ID NO: 4124 - DNA, 225 bp, Unknown; identical to SEQ ID NO: 4091
  bacterial strain Ascusb_804C encodes 16S rRNA

SEQ ID NO: 4125 - DNA, 225 bp, Unknown
  bacterial strain Ascusb_773A encodes 16S rRNA
agagtttgatcatggctcaggacgaacgctggcggcgtgcctaatacatgcaagtcgtgcggaccttttaaaagcttgcttttaaaaggttagcggcggacgggtgagtaacacgtgggcaacctgcctgtaagatcgggataacgccgggaaaccggggctaataccggatagttttttcctccgcatggaggaaaaaggaaagacggcttttgctgtcactta

SEQ ID NO: 4126 - DNA, 225 bp, Unknown; identical to SEQ ID NO: 4125
  bacterial strain Ascusb_15604A encodes 16S rRNA

SEQ ID NO: 4127 - DNA, 225 bp, Unknown; identical to SEQ ID NO: 4125
  bacterial strain Ascusb_17906A encodes 16S rRNA

SEQ ID NO: 4128 - DNA, 225 bp, Unknown; identical to SEQ ID NO: 1527
  bacterial strain Ascusb_15152B encodes 16S rRNA

SEQ ID NO: 4129 - DNA, 225 bp, Unknown
  bacterial strain Ascusb_136B encodes 16S rRNA
agagtttgatcctggctcaggatgaacgctagctacaggcttaacacatgcaagtcgaggggaaacgatgcggaagcttgcttctgcaggcgtcgaccggcgcacgggtgagtaacgcgtatccaacctgccccgaggtagggaataatccgtagaaatgcggtctaataccttatgtgctccgaagaggacatctgatttggagtaaagatttatcgccttggg

SEQ ID NO: 4130 - DNA, 225 bp, Unknown; identical to SEQ ID NO: 4121
  bacterial strain Ascusb_45A encodes 16S rRNA

SEQ ID NO: 4131 - DNA, 225 bp, Unknown; identical to SEQ ID NO: 4121
  bacterial strain Ascusb_2598A encodes 16S rRNA

SEQ ID NO: 4132 - DNA, 225 bp, Unknown; identical to SEQ ID NO: 4121
  bacterial strain Ascusb_17962A encodes 16S rRNA

SEQ ID NO: 4133 - DNA, 225 bp, Unknown; identical to SEQ ID NO: 4121
  bacterial strain Ascusb_13295A encodes 16S rRNA

SEQ ID NO: 4134 - DNA, 225 bp, Unknown; identical to SEQ ID NO: 4119
  bacterial strain Ascusb_4900A encodes 16S rRNA

SEQ ID NO: 4135 - DNA, 225 bp, Unknown
  bacterial strain Ascusb_223C encodes 16S rRNA
agagtttgatcatggctcaggacgaacgctggcggcgtgcctaatacatgcaagtcgaacgaactctggtattgattggtgcttgcatcatgatttacatttgagtgagtggcgaactggtgagtaacacgtgggaaacctgcccagaagcgggggataacacctggaaacagatgctaataccgcataacaacttggaccgcatggtccgagcttgaaagatgg

SEQ ID NO: 4136 - DNA, 225 bp, Unknown; identical to SEQ ID NO: 4135
  bacterial strain Ascusb_198C encodes 16S rRNA

SEQ ID NO: 4137 - DNA, 225 bp, Unknown
  bacterial strain Ascusb_19281B encodes 16S rRNA
agagtttgatcctggctcaggatgaacgctggcggcgtgcttaacacatgcaagtcgaacggagtttataagaggaagccttcgggtggaaacttataaacttagtggcggacgggtgagtaacgcgtgggtaacctgccttacacagggggataacaactggaaacggttgctaataccgcataagcgcacagcatcgcatgatacagtgtgaaaagatttatc

SEQ ID NO: 4138 - DNA, 225 bp, Unknown; identical to SEQ ID NO: 4137
  bacterial strain Ascusb_20167B encodes 16S rRNA

SEQ ID NO: 4139 - DNA, 225 bp, Unknown; identical to SEQ ID NO: 4137
  bacterial strain Ascusb_1125B encodes 16S rRNA

SEQ ID NO: 4140 - DNA, 225 bp, Unknown; identical to SEQ ID NO: 4137
  bacterial strain Ascusb_14943B encodes 16S rRNA

SEQ ID NO: 4141 - DNA, 225 bp, Unknown; identical to SEQ ID NO: 4137
  bacterial strain Ascusb_19296B encodes 16S rRNA

SEQ ID NO: 4142 - DNA, 225 bp, Unknown
  bacterial strain Ascusb_624C encodes 16S rRNA
agagtttgatcatggctcagattgaacgctggcggcaggcttaacacatgcaagtcgaacggtaacgggttgaaagcttgctttcaatgctgacgagtggcggacgggtgagtaaggcttggggatctggcttttggagggggataaccattggaaacgatggctaataccgcatagtatcgagagatgaaaggggtgggaaaccacttgccaagggatgaaccc

SEQ ID NO: 4143 - DNA, 225 bp, Unknown; identical to SEQ ID NO: 4142
  bacterial strain Ascusb_579B encodes 16S rRNA

SEQ ID NO: 4144 - DNA, 225 bp, Unknown; identical to SEQ ID NO: 4119
  bacterial strain Ascusb_1575A encodes 16S rRNA

SEQ ID NO: 4145 - DNA, 225 bp, Unknown; identical to SEQ ID NO: 4119
  bacterial strain Ascusb_21055A encodes 16S rRNA

SEQ ID NO: 4146 - DNA, 225 bp, Unknown; identical to SEQ ID NO: 4064
  bacterial strain Ascusb_4208B encodes 16S rRNA

SEQ ID NO: 4147 - DNA, 225 bp, Unknown; identical to SEQ ID NO: 4090
  bacterial strain Ascusb_3089C encodes 16S rRNA

SEQ ID NO: 4148 - DNA, 225 bp, Unknown
  bacterial strain Ascusb_2255A encodes 16S rRNA
agagtttgatcatggctcaggatgaacgctagctacaggcttaacacatgcaagtcgaggggcagcatttcagtttgcttgcaaactggagatggcgaccggcgcacgggtgagtaacacgtatccaacctgccgataactcggggatagcctttcgaaagaaagattaatacccgatggtataatcagaccgcatggtcttgttattaaagaatttcggttatc

SEQ ID NO: 4149 - DNA, 225 bp, Unknown
  bacterial strain Ascusb_338A encodes 16S rRNA
agagtttgatcctggctcaggatgaacgctagctacaggcttaacacatgcaagtcgaggggcagcattgggatagcttgctattccagatggcgaccggcgcacgggtgagtaacgcgtatccaaccttccctatagtagagaatagcccggcgaaagtcgaattaatgctctatgttgtgttttgaggacatctgacgaacaccaaaggttcaccgctatagg

SEQ ID NO: 4150 - DNA, 225 bp, Unknown
  bacterial strain Ascusb_10663B encodes 16S rRNA
agagtttgatcctggctcagattgaacgctggcggcaggcctaacacatgcaagtcgaacggtaacaggaagcagcttgctgcttcgctgacgagtggcggacgggtgagtaatgtctgggaaactgcctgatggagggggataactactggaaacggtagctaataccgcataacgtcgcaagaccaaagtgggggacctttgggcctcatgccatcagatgtg

SEQ ID NO: 4151 - DNA, 225 bp, Unknown
  bacterial strain Ascusb_4840B encodes 16S rRNA
agagtttgatcatggctcaggatgaacgctagctacaggcttaacacatgcaagtcgaggggcagcatgaacttagcttgctaagtttgatggcgaccggcgcacgggtgagtaacgcgtatccaacctggcccacagtagggtatagcccggcgaaagtcggattaatcccctatgcactccgaagcgggcatctaatttggagtaaaggtttaccgctgtggg

SEQ ID NO: 4152 - DNA, 225 bp, Unknown
  bacterial strain Ascusb_1834B encodes 16S rRNA
agagtttgatcctggctcaggatgaacgctagctacaggcttaacacatgcaagtcgaggggcagcatagggtttgcttgcaaactctgatggcgaccggcgcacgggtgagtaacgcgtatccaacctgcccatggctagggaatagcccgttgaaaagcggattaatgccctatggggtcctttgcagacatctaacgaggactaaaggtttaccggccatgg

SEQ ID NO: 4153 - DNA, 225 bp, Unknown
  bacterial strain Ascusb_3969A encodes 16S rRNA
agagtttgatcatggctcaggatgaacgctagctacaggcttaacacatgcaagtcgaggggcagcatatcgaaagcttgcttttgatgatggcgaccggcgcacgggtgagtaacgcgtatccaaccttccctatactagaggatagcccggcgaaagtcggattaatactctatgttcttcgtagaagacatctgaaatgaagcaaaggtttaccggtatagg

SEQ ID NO: 4154 - DNA, 225 bp, Unknown
  bacterial strain Ascusb_1115A encodes 16S rRNA
agagtttgatcatggctcaggatgaacgctggcggcgtgcctaacacatgcaagtcgaacgaaactgattccatgaaacttcggtagattggatgaaagttgagtggcggacgggtgagtaacacgtgggcaacctgcctcacagagggggatagcagttggaaacgactgataataccgcataagcacacagtaccgcatggtacagggtgaaaagatttatca

SEQ ID NO: 4155 - DNA, 225 bp, Unknown
  bacterial strain Ascusb_724B encodes 16S rRNA
agagtttgatcctggctcaggatgaacgctggcggcgtgcctaatacatgcaagtcgagcgagggtagcaatacccgagcggcgaacgggtgagtaacacgtaggtaacctgcctttgagactgggatacccggacgaaagttcggctaataccggataacaacggggacggcatcgtctccgcttgaaaggtgcgtttgcaccactcttagatggacctgcggc

SEQ ID NO: 4156 - DNA, 225 bp, Unknown; identical to SEQ ID NO: 4155
  bacterial strain Ascusb_2886C encodes 16S rRNA

SEQ ID NO: 4157 - DNA, 225 bp, Unknown; identical to SEQ ID NO: 4155
  bacterial strain Ascusb_2027B encodes 16S rRNA

SEQ ID NO: 4158 - DNA, 217 bp, Unknown
  bacterial strain Ascusb_514B encodes 16S rRNA
agagtttgatcctggctcaggacgaacgctggcggcgtgcctaatacatgcaagtcgagcggacttgatggagagcttgctctcctgatggttagcggcggacgggtgagtaacacgtaggtaacctgcctgtaagactgggataactagcggaaacgttagctaataccggataatttattttctcgcatgggaagataatgaaagacggagcaat

SEQ ID NO: 4159 - DNA, 217 bp, Unknown; identical to SEQ ID NO: 4158
  bacterial strain Ascusb_4119C encodes 16S rRNA

SEQ ID NO: 4160 - DNA, 225 bp, Unknown
  bacterial strain Ascusb_1549A encodes 16S rRNA
agagtttgatcatggctcaggatgaacgctagctacaggcttaacacatgcaagtcgaggggaaacgacatcgaaagcttgcttttggtgggcgtcgaccggcgcacgggtgagtaacgcgtatccaacctacctggaaataaggaataatccgtggaaacgcggtctaatgccttatgtgctccgatgaggacatctgaattggagtaaagatttattgttttc

SEQ ID NO: 4161 - DNA, 217 bp, Unknown; identical to SEQ ID NO: 4158
  bacterial strain Ascusb_4552A encodes 16S rRNA

SEQ ID NO: 4162 - DNA, 225 bp, Unknown; identical to SEQ ID NO: 2461
  bacterial strain Ascusb_9020B encodes 16S rRNA

SEQ ID NO: 4163 - DNA, 225 bp, Unknown; identical to SEQ ID NO: 3885
  bacterial strain Ascusb_1867A encodes 16S rRNA

SEQ ID NO: 4164 - DNA, 225 bp, Unknown; identical to SEQ ID NO: 3885
  bacterial strain Ascusb_3294A encodes 16S rRNA

SEQ ID NO: 4165 - DNA, 225 bp, Unknown; identical to SEQ ID NO: 2054
  bacterial strain Ascusb_855A encodes 16S rRNA

SEQ ID NO: 4166 - DNA, 225 bp, Unknown; identical to SEQ ID NO: 2054
  bacterial strain Ascusb_1281A encodes 16S rRNA

SEQ ID NO: 4167 - DNA, 225 bp, Unknown
  bacterial strain Ascusb_1985C encodes 16S rRNA
agagtttgatcctggctcaggatgaacgctagctacaggcttaacacatgcaagtcgaggggtaacgacagcgaaagcttgctttcgataggcgacgaccggcgcacgggtgagtaacgcgtatccaacctgcccataactaagggataatccgtagaaatgcggtctaataccttatgtgttccgacgaggacatctgaattggaataaagatttatcggttat

SEQ ID NO: 4168 - DNA, 225 bp, Unknown; identical to SEQ ID NO: 4167
  bacterial strain Ascusb_14185B encodes 16S rRNA

SEQ ID NO: 4169 - DNA, 225 bp, Unknown; identical to SEQ ID NO: 4167
  bacterial strain Ascusb_3092B encodes 16S rRNA

SEQ ID NO: 4170 - DNA, 225 bp, Unknown; identical to SEQ ID NO: 4167
  bacterial strain Ascusb_15051A encodes 16S rRNA

SEQ ID NO: 4171 - DNA, 225 bp, Unknown
  bacterial strain Ascusb_35A encodes 16S rRNA
agagtttgatcctggctcaggacgaacgctggcggcgtgcttaacacatgcaagtcgaacgatgaacctccttcgggaggggattagtggcgaacgggtgagtaacacgtgggcaacctgccccgcacactgggataagccctggaaacggggtctaataccggatatgactcaaggtcgcatggtcttgggtggaaagctccggcggtgcgggatgggcccgcg

SEQ ID NO: 4172 - DNA, 225 bp, Unknown
  bacterial strain Ascusb_8042A encodes 16S rRNA
agagtttgatcctggctcaggatgaacgctggcggcgtgcctaacacatgcaagtcgaacggagtttagcgctgatgaagcttcggcagattcttgttaaacttagtggcggacgggtgagtaacgcgtgggtaacctgcctcatacagggggatagcagttggaaacgactgataacaccgcataagcgcacaggatcgcatgatctagtgtgaaaatatttat

SEQ ID NO: 4173 - DNA, 225 bp, Unknown
  bacterial strain Ascusb_3554A encodes 16S rRNA
agagtttgatcctggctcaggacgaacgctggcggcgtgcttaacacatgcaagtcgaacgagaagagatgagaagcttgcttcttattgattcgagtggcaaacgggtgagtaacgcgtaagcaacctgcccttcagatggggacaacagctggaaacggctgctaataccgaatacgttctttttgtcgcatggcagagagaagaaagggaggctcttcggag

SEQ ID NO: 4174 - DNA, 225 bp, Unknown
  bacterial strain Ascusb_5201B encodes 16S rRNA
agagtttgatcatggctcaggacgaacgctggcggcgtgcctaatacatgcaagtcgagcggacctgatggagtgcttgcactcctgacggttagcggcggacgggtgagtaacacgtaggcaacctgcccgtaagaccgggataactaccggaaacggtagctaataccggataatcaagtcttccgcatgggaggcttgggaaaggcggttctgaatttattc

SEQ ID NO: 4175 - DNA, 225 bp, Unknown; identical to SEQ ID NO: 62
  bacterial strain Ascusb_6229A encodes 16S rRNA

SEQ ID NO: 4176 - DNA, 225 bp, Unknown
  bacterial strain Ascusb_2648A encodes 16S rRNA
agagtttgatcctggctcaggacgaacgctggcggcgtgcctaatacatgcaagtcgaacgctttttctttcaccggagcttgctccaccgaaagaaaaagagtggcgaacgggtgagtaacacgtgggtaacctgcccatcagaaggggataacacttggaaacaggtgctaataccgtataacactattttccgcatgggagaaagttgaaaggcgcttttgc

SEQ ID NO: 4177 - DNA, 225 bp, Unknown; identical to SEQ ID NO: 4176
  bacterial strain Ascusb_4062A encodes 16S rRNA

SEQ ID NO: 4178 - DNA, 225 bp, Unknown
  bacterial strain Ascusb_3539A encodes 16S rRNA
agagtttgatcctggctcaggatgaacgctagctacaggcttaacacatgcaagtcgaggggcagcatgacggtagcttgctactgttgatggcgaccggcgcacgggtgagtaacgcgtatccaaccttcccacaaataaggaatagcccggtgaaaatcgaattaataccttatgtggtcataagaagacatctgattatgattaaagatttatcgtttgtgg

SEQ ID NO: 4179 - DNA, 225 bp, Unknown
  bacterial strain Ascusb_10976B encodes 16S rRNA
agagtttgatcatggctcagattgaacgctggcggcaggcttaatacatgcaagtcgaacggtaacggcaggaagcttgcttcctggctgacgagtggcggacgggtgagtaatacctggggagctgcctgaatgagggggacaacacctggaaacgggtgctaataccgcgtaagccctgagggggaaaggccgggcaaccggtcgcattcagatgcgcccagg

SEQ ID NO: 4180 - DNA, 225 bp, Unknown; identical to SEQ ID NO: 4179
  bacterial strain Ascusb_15111B encodes 16S rRNA

SEQ ID NO: 4181 - DNA, 225 bp, Unknown; identical to SEQ ID NO: 4179
  bacterial strain Ascusb_15117B encodes 16S rRNA

SEQ ID NO: 4182 - DNA, 225 bp, Unknown; identical to SEQ ID NO: 4179
  bacterial strain Ascusb_9316A encodes 16S rRNA

SEQ ID NO: 4183 - DNA, 225 bp, Unknown; identical to SEQ ID NO: 4070
  bacterial strain Ascusb_992A encodes 16S rRNA

SEQ ID NO: 4184 - DNA, 225 bp, Unknown; identical to SEQ ID NO: 4070
  bacterial strain Ascusb_12024A encodes 16S rRNA

SEQ ID NO: 4185 - DNA, 225 bp, Unknown; identical to SEQ ID NO: 4070
  bacterial strain Ascusb_3175A encodes 16S rRNA

SEQ ID NO: 4186 - DNA, 225 bp, Unknown; identical to SEQ ID NO: 4070
  bacterial strain Ascusb_5433A encodes 16S rRNA

SEQ ID NO: 4187 - DNA, 225 bp, Unknown; identical to SEQ ID NO: 2098
  bacterial strain Ascusb_17652B encodes 16S rRNA

SEQ ID NO: 4188 - DNA, 225 bp, Unknown; identical to SEQ ID NO: 4178
  bacterial strain Ascusb_511A encodes 16S rRNA

SEQ ID NO: 4189 - DNA, 225 bp, Unknown; identical to SEQ ID NO: 4178
  bacterial strain Ascusb_312A encodes 16S rRNA

SEQ ID NO: 4190 - DNA, 225 bp, Unknown
  bacterial strain Ascusb_19874A encodes 16S rRNA
agagtttgatcatggctcaggacgaacgctggcggcgtgcttaacacatgcaagtcgagcgatgaagcttccttcgggaggtggattagcggcggacgggtgagtaacacgtgggtaacctgcctcaaagtgggggatagccttccgaaaggaagattaataccgcataatataagagaatcgcatgattttcttatcaaagatttattgctttgagatggaccc

SEQ ID NO: 4191 - DNA, 225 bp, Unknown; identical to SEQ ID NO: 4176
  bacterial strain Ascusb_6130A encodes 16S rRNA

SEQ ID NO: 4192 - DNA, 225 bp, Unknown; identical to SEQ ID NO: 4190
  bacterial strain Ascusb_3228A encodes 16S rRNA

SEQ ID NO: 4193 - DNA, 225 bp, Unknown; identical to SEQ ID NO: 4190
  bacterial strain Ascusb_116A encodes 16S rRNA

SEQ ID NO: 4194 - DNA, 225 bp, Unknown; identical to SEQ ID NO: 4190
  bacterial strain Ascusb_439A encodes 16S rRNA

SEQ ID NO: 4195 - DNA, 225 bp, Unknown; identical to SEQ ID NO: 4190
  bacterial strain Ascusb_10919A encodes 16S rRNA

SEQ ID NO: 4196 - DNA, 225 bp, Unknown
  bacterial strain Ascusb_2272B encodes 16S rRNA
agagtttgatcatggctcaggatgaacgctggcggcgtgcctaacacatgcaagtcgaacggtgatccattgatattttcggatggatatggatcatagtggcggacgggtgagtaacgcgtggataacctgcctctctctgggggatagcagctggaaacggctggtaataccgcataagaccacagagccgcatgactcaggggtaaaagatttatcggagag

SEQ ID NO: 4197 - DNA, 225 bp, Unknown
  bacterial strain Ascusb_19172B encodes 16S rRNA
agagtttgatcatggctcaggacgaacgctggcggcgtgcctaatacatgcaagtagaacgctgaagactttagcttgctaaagttggaagagttgcgaacgggtgagtaacgcgtaggtaacctgcctactagcgggggataactattggaaacgatagctaataccgcataacagcatttaacccatgttagatgcttgaaaggagcaattgcttcactagta

SEQ ID NO: 4198 - DNA, 225 bp, Unknown; identical to SEQ ID NO: 4197
  bacterial strain Ascusb_3031A encodes 16S rRNA

SEQ ID NO: 4199 - DNA, 225 bp, Unknown
  bacterial strain Ascusb_351B encodes 16S rRNA
agagtttgatcatggctcaggatgaacgctagctacaggcttaacacatgcaagtcgaggggcagcgtgtacaggtgcttgcaccagtatgacggcgaccggcgcacgggtgagtaacgcgtatccaacctgccatatactcgggtatagcccggtgaaaaccgaattaacccccgatagtgtcctttgcaggcatctaattaggactaaagtttacggtatatg

SEQ ID NO: 4200 - DNA, 225 bp, Unknown
  bacterial strain Ascusb_417A encodes 16S rRNA
agagtttgatcctggctcaggatgaacgctggcggcgtgcctaacacatgcaagtcgaacgaataacccgccttcgggcggtcatagagtggcgaacgggtgagtaacacgtgaccaaccttccccccgcatggggataaccgggcgaaagcccggctaatacccaatactccgggccctccgcatggaggggccgggaaagcccaggcggcgggggatggggtc

SEQ ID NO: 4201 - DNA, 225 bp, Unknown
  bacterial strain Ascusb_2003A encodes 16S rRNA
agagtttgatcatggctcaggatgaacgctagctacaggcttaacacatgcaagtcgaggggcatcatgaaggaagcttgcttcctttgatggcgaccggcgcacgggtgagtaacgcgtatccaaccttcccctcagtagggcatagcccgtagaaatgcggattaataccctatgtggtccgatgaggacatctgagctggactaaaggtttaccgctgaggg

SEQ ID NO: 4202 - DNA, 225 bp, Unknown; identical to SEQ ID NO: 4176
  bacterial strain Ascusb_1276A encodes 16S rRNA

SEQ ID NO: 4203 - DNA, 225 bp, Unknown
  bacterial strain Ascusb_56A encodes 16S rRNA
agagtttgatcctggctcaggacgaacgctggcggcgtgcttaacacatgcaagtcgagcggtaaggccccttcgggggtacacgagcggcgaacgggtgagtaacacgtgagtaacctgcccctgactctgggataagcctgggaaactgggtctaataccggatatgacctcgtgccgcatggtgtggggtggaaaggtgtttttccggtcagggatgggctc

SEQ ID NO: 4204 - DNA, 225 bp, Unknown; identical to SEQ ID NO: 4149
  bacterial strain Ascusb_847A encodes 16S rRNA

SEQ ID NO: 4205 - DNA, 225 bp, Unknown
  bacterial strain Ascusb_625A encodes 16S rRNA
agagtttgatcatggctcaggatgaacgctagctacaggcttaacacatgcaagtcgaggggcagcgagaagagagcttgctttctttgtcggcgaccggcgcacgggtgagtaacgcgtatccaaccttccccatagtagaggatagcccggcgaaagtcggattaatactctatgttgtattttgaggacatctgacgaataccaaagattgatcgctatggg

SEQ ID NO: 4206 - DNA, 225 bp, Unknown
  bacterial strain Ascusb_5587B encodes 16S rRNA
agagtttgatcatggctcaggacgaacgctggcggcgtgcctcctcccttcccgtctccctcttcctcctttctctttctccctttttccgcgttgcgaacgggtgagtaacgcgtaggtaacctgcctactagcgggggataactattggaaacgatagctaataccgcataacagcatttaacacatgttagatgcttgaaaggagcaattgcttcactagta

SEQ ID NO: 4207 - DNA, 225 bp, Unknown
  bacterial strain Ascusb_253A encodes 16S rRNA
agagtttgatcatggctcaggatgaacgctggcggcgtgcctaacacatgcaagtcgaacgagcgagagatgaaacctagtgattctcgagcgagtggcggacgggtgagtaacgcgtgggtaacctgccttacagagggggataacagtttgaaaagactgctaataccgcataagcacacagtaccgcatggtacagggtgaaaagatttatcactgtaagat

SEQ ID NO: 4208 - DNA, 225 bp, Unknown
  bacterial strain Ascusb_355A encodes 16S rRNA
agagtttgatcctggctcaggatgaacgctagctacaggcttaacacatgcaagtcgaggggcagcataacgaaagcttgcttttgttgatggcgaccggcgcacgggtgagtaacgcgtatccaaccttccctatagtagagaatagcccggcgaaagtcggattaatgctctatgttgtatttagaggacatctgaagaataccaaaggtttaccgctatagg

SEQ ID NO: 4209 - DNA, 225 bp, Unknown
  bacterial strain Ascusb_3326A encodes 16S rRNA
agagtttgatcatggctcaggatgaacgctagctacaggcttaacacatgcaagtcgaggggcatcatggagtttgcttgcaaactctgatggcgaccggcgcacgggtgagtaacgcgtatccaaccttccctatagtagaggatagcccggcgaaagtcggattaatactctatgttttccgttgcagacatctaagatggaacaaaggcttgccgctatagg

SEQ ID NO: 4210 - DNA, 225 bp, Unknown
  bacterial strain Ascusb_8129A encodes 16S rRNA
agagtttgatcctggctcaggatgaacgctagctacaggcttaacacatgcaagtcgaggggcagcatggagtttgcttgcaaactctgatggcgaccggcgcacgggtgagtaacgcgtatccaaccttccccccagtagggcatagcccggtgaaaatcggattaataccctatgttgtattttgaggacatctgacgaataccaaaggtttaccgctagggg

SEQ ID NO: 4211 - DNA, 225 bp, Unknown; identical to SEQ ID NO: 3152
  bacterial strain Ascusb_1040A encodes 16S rRNA

SEQ ID NO: 4212 - DNA, 217 bp, Unknown
  bacterial strain Ascusb_4420B encodes 16S rRNA
agagtttgatcctggctcaggacgaacgctggcggcgtgcctaatacatgcaagtcgagcggacttgatggagagcttgctctcttgagagttagcggcggacgggtgagtaacacgtaggcaacctgcctgtaagactgggataactagcggaaacgttagctaataccggataatttattttctcgcatgggaagataatgaaagacggagcaat

SEQ ID NO: 4213 - DNA, 225 bp, Unknown
  bacterial strain Ascusb_7814A encodes 16S rRNA
agagtttgatcctggctcaggacgaacgctggcggcgtgcttaacacatgcaagtcgagcgatgaagcttccttcgggaagtggattagcggcggacgggtgagtaacacgtgggtaacctgcctcaaagtgggggatagccttccgaaaggaagattaataccgcataatatgagagaatcgcatgattttcttatcaaagatttattgctttgagatggaccc

SEQ ID NO: 4214 - DNA, 225 bp, Unknown
  bacterial strain Ascusb_544A encodes 16S rRNA
agagtttgatcatggctcaggatgaacgctagctacaggcttaacacatgcaagtcgaggggcagcagggagatagcttgctatctttgctggcgaccggcgcacgggtgagtaacgcgtatccaaccttccccttactaaggaatagcccggcgaaagtcggattaatgccttatgttctcctttgcaggcatctaacgaggagcaaagattcatcggtaaggg

SEQ ID NO: 4215 - DNA, 225 bp, Unknown
  bacterial strain Ascusb_3868A encodes 16S rRNA
agagtttgatcctggctcaggatgaacgctagctacaggcttaacacatgcaagtcgaggggcagcattgggatagcttgctattccagatggcgaccggcgcacgggtgagtaacgcgtatccaaccttccccatagtagggcatagcccgtagaaatgcggattaataccctatgttttccgaagatgacatctgatttggaacaaaggttcaccgctatggg

SEQ ID NO: 4216 - DNA, 225 bp, Unknown; identical to SEQ ID NO: 4215
  bacterial strain Ascusb_2413A encodes 16S rRNA

SEQ ID NO: 4217 - DNA, 225 bp, Unknown; identical to SEQ ID NO: 4215
  bacterial strain Ascusb_9933A encodes 16S rRNA

SEQ ID NO: 4218 - DNA, 225 bp, Unknown
  bacterial strain Ascusb_17128B encodes 16S rRNA
agagtttgatcatggctcaggatgaacgctagctacaggcttaacacatgcaagtcgaggggcatcatgggagttgcttgcaacttctgatggcgaccggcgcacgggtgagtaacgcgtatccaaccttccccctagcaggggatagcccggcgaaagtcggattaataccctatgttcttcgttgatggcatcagatatgaagcaaaggtttaccgctatggg

SEQ ID NO: 4219 - DNA, 225 bp, Unknown; identical to SEQ ID NO: 4218
  bacterial strain Ascusb_57B encodes 16S rRNA

SEQ ID NO: 4220 - DNA, 217 bp, Unknown; identical to SEQ ID NO: 4158
  bacterial strain Ascusb_136A encodes 16S rRNA

SEQ ID NO: 4221 - DNA, 225 bp, Unknown
  bacterial strain Ascusb_6424B encodes 16S rRNA
agagtttgatcctggctcaggatgaacgctagctacaggcttaacacatgcaagtcgaggggcagcatgaagtttgcttgcaaactttgatggcgaccggcgcacgggtgagtaacgcgtatccaaccttccctatactagaggatagcccggcgaaagtcggattaatactctatgttgtatttagaagacatctgaagaataccaaaggtttaccggtatagg

SEQ ID NO: 4222 - DNA, 225 bp, Unknown
  bacterial strain Ascusb_375C encodes 16S rRNA
agagtttgatcctggctcaggatgaacgctagctacaggcttaacacatgcaagtcgaggggcagcatggagtcagcttgctgactccgatggcgaccggcgcacgggtgagtaacgcgtatccaaccttccctatactaggggatagcccggcgaaagtcggattaataccctatgttcttcatagatggcatctgacgtgaagcaaagattcatcggtatagg

SEQ ID NO: 4223 - DNA, 225 bp, Unknown
  bacterial strain Ascusb_619A encodes 16S rRNA
agagtttgatcatggctcaggacgaacgctggcggcgtgcctaatacatgcaagtcgagcggatttgatggagagcttgctctccagagagttagcggcggacgggtgaataacacgtaggcaacctgcctgtaagactgggataactagcggaaacgttagctaataccggataatttattttctcgcatggggagataatgaaagacggagcaatctgtcact

SEQ ID NO: 4224 - DNA, 225 bp, Unknown
  bacterial strain Ascusb_143A encodes 16S rRNA
agagtttgatcatggctcaggattaacgctggcggcgtgcctaatacatgcaagtcgaatggtagcaataccatggcgaacgggtgagtaacacgtaggtaacctgtctttatgccgaggataaccattggaaacgatggataatactggataggacaattgatggcatcattaattgtttaaagatttatcacatagagaggggcctgcggcgcattagctagt

SEQ ID NO: 4225 - DNA, 225 bp, Unknown
  bacterial strain Ascusb_318B encodes 16S rRNA
agagtttgatcctggctcaggacgaacgctggcggcgtgcctaatacatgcaagtcgagcggagttaatcgggagcttgctcctgattaacttagcggcggacgggtgagtaacacgtaggcaacctgcccgtaagaccgggataactaccggaaacggtagctaataccggataatcaagtttctcgcatgaggggcttgggaaaggcggttctgaatttattc

SEQ ID NO: 4226 - DNA, 225 bp, Unknown; identical to SEQ ID NO: 4070
  bacterial strain Ascusb_2432B encodes 16S rRNA

SEQ ID NO: 4227 - DNA, 225 bp, Unknown
  bacterial strain Ascusb_2775A encodes 16S rRNA
agagtttgatcatggctcaggatgaacgctggcggcgtgcctaatacatgcaagtcgagcgaacagataaggagcttgctcctttgacgttagcggcggacgggtgagtaacacgtgggtaacctacctataagactgggataacttcgggaaaccggagctaatactggataacatttggaaccgcatggttctaaagtgaaagatggttttgctatcacttat

SEQ ID NO: 4228 - DNA, 225 bp, Unknown; identical to SEQ ID NO: 4227
  bacterial strain Ascusb_7077B encodes 16S rRNA

SEQ ID NO: 4229 - DNA, 225 bp, Unknown
  bacterial strain Ascusb_2569A encodes 16S rRNA
agagtttgatcatggctcaggatgaacgctggcggcgtgcctaatacatgcaagtcgaacggagagacaatgtctctcagtggcgaacgggtgagtacaacataggcaacctgcccttcagagggggacaacagatggaaacgtctgctaataccgcatatccgcaggacccgcatgggacctgcgctaaaggagcaaccgctccgctggaggatggacctatgc

SEQ ID NO: 4230 - DNA, 225 bp, Unknown
  bacterial strain Ascusb_1508A encodes 16S rRNA
agagtttgatcatggctcaggacgaacgctggcggcgtgcttaacacatgcaagtcgagcgatgaagcttccttcgggaagtggattagcggcggacgggtgagtaacacgtgggtaacctgcctcaaagtgggggatagccttccgaaaggaagattaataccgcataatatgagagaatcgcatgattttcttatcaaagatttattgctttgagatggaccc

SEQ ID NO: 4231 - DNA, 225 bp, Unknown
  bacterial strain Ascusb_2381B encodes 16S rRNA
agagtttgatcctggctcaggatgaacgctggcggcgtgcttaacacatgcaagtcgaacgaagcactttcttacgatcccttcggggtgacgagtttgtgactgagtggcggacgggtgagtaacgcgtgggtaacctgccttatacagggggataacagttggaaacggctgctaataccgcataagcgcacagtatcgcatgatacagtgtgaaaaactccg

SEQ ID NO: 4232 - DNA, 225 bp, Unknown; identical to SEQ ID NO: 4207
  bacterial strain Ascusb_16891B encodes 16S rRNA

SEQ ID NO: 4233 - DNA, 225 bp, Unknown
  bacterial strain Ascusb_2446A encodes 16S rRNA
agagtttgatcatggctcaggatgaacgctagctacaggcttaacacatgcaagtcgaggggtaacgatattgaaagcttgctttcgataggcgacgaccggcgcacgggtgagtaacgcgtatccaacctgcccataactaagggataatccgtagaaatgcggtctaataccttatgtgttccgatgaggacatctgaattggaataaagatttatcggttat

SEQ ID NO: 4234 - DNA, 225 bp, Unknown
  bacterial strain Ascusb_75A encodes 16S rRNA
agagtttgatcatggctcagattgaacgctggcggcaggcctaacacatgcaagtcgagcggatgaagggagcttgctccctgactcagcggcggacgggtgagtaatgcctaggaatctgcctggtagtgggggacaacgtctcgaaagggacgctaataccgcatacgtcctacgggagaaagtgggggatcttcggacctcacgctatcagatgagcctagg

SEQ ID NO: 4235 - DNA, 225 bp, Unknown; identical to SEQ ID NO: 2457
  bacterial strain Ascusb_75B encodes 16S rRNA

SEQ ID NO: 4236 - DNA, 225 bp, Unknown
  bacterial strain Ascusb_1195A encodes 16S rRNA
agagtttgatcatggctcaggacgaacgctggcggcgtgcctaatacatgcaagtcgaacggtagcgggaggaaagcttgctttctttgccgacgagtggcggacgggtgagtaatgcttggggatctggcttatggagggggataacgacgggaaactgtcgctaataccgcgtaatatcttcggattaaagggtgggactttcgggccacccgccataagatg

SEQ ID NO: 4237 - DNA, 225 bp, Unknown
  bacterial strain Ascusb_725B encodes 16S rRNA
agagtttgatcatggctcaggacgaacgctggcggcgtgcttaacacatgcaagtcgaacgaagagcgatggaagcttgcttctatcaatcttagtggcgaacgggtgagtaacgcgtaatcaacctgcccttcagagggggacaacagttggaaacgactgctaataccgcatacgatctaacctcggcatcgaggaaagatgaaaggtggcctctatttataa

SEQ ID NO: 4238 - DNA, 225 bp, Unknown
  bacterial strain Ascusb_1253A encodes 16S rRNA
agagtttgatcatggctcaggacgaacgctggcggcgtgcttaacacatgcaagtcgaacgagaagagatgagaagcttgcttcttatcaattcgagtggcaaacgggtgagtaacgcgtaagcaacctgccctttagatggggacaacagctggaaacggctgctaataccgaatacgttctttttgtcgcatggcagagggaagaaagggaggctcttcggag

SEQ ID NO: 4239 - DNA, 225 bp, Unknown
  bacterial strain Ascusb_112B encodes 16S rRNA
agagtttgatcatggctcaggacgaacgctggcggcgtgcctaatacatgcaagtagaacgaggctcttcggagccgagtggcgtacgggtgagtaacacgttggtaacctgccctccagaccggaataccagagagaaatctctgctaatgccggatgacgtcatatggtcgcaagaccacttgaccaaaggcggcaactgccgcgctgaaggatggacctgcg

SEQ ID NO: 4240 - DNA, 225 bp, Unknown
  bacterial strain Ascusb_81A encodes 16S rRNA
agagtttgatcatggctcaggatgaacgctagctacaggcttaacacatgcaagtcgtggggcagcatcggagaagcttcggcttatccggatggcgaccggcgaatgggtgagtaacacgtatccaacctgccgcccagtgaggaataggctcccgaaagggaaattaatgcctcatgaggtgtgtttctgacatcagagacatacgaaagccgcgaggcgctg

SEQ ID NO: 4241 - DNA, 225 bp, Unknown
  bacterial strain Ascusb_4736B encodes 16S rRNA
agagtttgatcatggctcaggatgaacgctagctacaggcttaacacatgcaagtcgaggggcagcatgaagtttgcttgcaaactttgatggcgaccggcgcacgggtgagtaacgcgtatccaaccttccctatagtagaggatagcccggcgaaagtcggattaatactctatgttttccaatgcagacatctaaaatggaacaaaggtttaccgctatagg

SEQ ID NO: 4242 - DNA, 225 bp, Unknown
  bacterial strain Ascusb_1630B encodes 16S rRNA
agagtttgatcatggctcaggatgaacgctggcggcgtgcctaatacatgcaagtcgagcgaacagataaggagcttgctcctttgacgttagcggcggacgggtgagtaacacgtgggtaacctacctataagactgggataacttcgggaaaccggagctaataccggataacatttggaaccgcatggttctaaagtgaaagatggttttgctatcacttat

SEQ ID NO: 4243 - DNA, 225 bp, Unknown
  bacterial strain Ascusb_2754A encodes 16S rRNA
agagtttgatcatggctcagattgaacgctggcggcaggcctaacacatgcaagtcgagcggtagcacagagagcttgctctcgggtgacgagcggcggacgggtgagtaatgtctgggaaactgcctgatggagggggataactactggaaacggtagctaataccgcataatgtcgcaagaccaaagtgggggaccttcgggcctcatgccatcagatgtgcc

SEQ ID NO: 4244 - DNA, 225 bp, Unknown; identical to SEQ ID NO: 4243
  bacterial strain Ascusb_9379A encodes 16S rRNA

SEQ ID NO: 4245 - DNA, 225 bp, Unknown; identical to SEQ ID NO: 4243
  bacterial strain Ascusb_2786B encodes 16S rRNA

SEQ ID NO: 4246 - DNA, 225 bp, Unknown
  bacterial strain Ascusb_7910A encodes 16S rRNA
agagtttgatcatggctcaggatgaacgctagctacaggcttaacacatgcaagtcgaggggcatcatgatttgtgcttgcacagattgatggcgaccggcgcacgggtgagtaacgcgtatccaaccttccccttagtagcggatagcccggcgaaagtcggattaatacgctatgttgtattttgaggacatctgaggaataccaaagattcatcgctaaggg

SEQ ID NO: 4247 - DNA, 225 bp, Unknown
  bacterial strain Ascusb_328A encodes 16S rRNA
agagtttgatcatggctcaggatgaacgctagctacaggcttaacacatgcaagtcgaggggcagcatgaagtttgcttgcaaactttgatggcgaccggcgcacgggtgagtaacgcgtatccaaccttccccttagtagaggatagcccggtgaaaatcggattaatactctatgttcttcgacgaggacatctgaattgaagcaaagattcatcgctaaggg

SEQ ID NO: 4248 - DNA, 225 bp, Unknown
  bacterial strain Ascusb_471A encodes 16S rRNA
agagtttgatcctggctcaggatgaacgctggcggcatgcctaatacatgcaagtcgaacgggagtgcttgcactccagtggcgaacgggtgagtaatacataggtaacctgtccttaagacgaggatagcttctagaaatggaagataaaactggataggacatcacaaatcacatgattagatgtttaaaagagcaatctacttaaggaggggcctgtggcgc

SEQ ID NO: 4249 - DNA, 225 bp, Unknown
  bacterial strain Ascusb_3264C encodes 16S rRNA
agagtttgatcatggctcaggatgaacgctagctacaggcttaacacatgcaagtcgaggggtaacgacagcgaaagcttgcttttgctgggcgacgaccggcgaatgggtgagtaacgcgtatccaacctgccgcaaagtagggcacagccttgcgaaagtaagattaatgccctatgtgctgtgatgatgacatcagaattgcagtaaaggttcaccgctttg

SEQ ID NO: 4250 - DNA, 225 bp, Unknown
  bacterial strain Ascusb_20A encodes 16S rRNA
agagtttgatcatggctcagattgaacgctggcggcaggcctaacacatgcaagtcgaacggtaacaggaaacagcttgctgtttcgctgacgagtggcggacgggtgagtaatgtctgggaaactgcctgatggagggggataactactggaaacggtagctaataccgcataatgtcgtaagaccaaagagggggaccttcgggcctcttgccatcggatgtg

SEQ ID NO: 4251 - DNA, 225 bp, Unknown
  bacterial strain Ascusb_1715B encodes 16S rRNA
agagtttgatcatggctcaggacgaacgctggcggcgtgcctaatacatgcaagtcgaacgcttctttttccaccggagcttgctccaccggaaaaagaggagtggcgaacgggtgagtaacacgtgggtaacctgcccatcagaaggggataacacttggaaacaggtgctaataccgcataacaatcaaaaccgcatggttttgatttgaaaggcgctttcgg

SEQ ID NO: 4252 - DNA, 225 bp, Unknown
  bacterial strain Ascusb_1291A encodes 16S rRNA
agagtttgatcatggctcaggacgaacgctggcggcgtgcctaatacatgcaagtagaacgctgaagactttagcttgctaaagttggaagagtggcgaacgggtgagtaacacgtgggtaacctgcccatcagaaggggataacacttggaaacaggtgctaataccgtataacactattttccgcatggaagaaagttgaaaggcgcttttgcgtcactgatg

SEQ ID NO: 4253 - DNA, 225 bp, Unknown
  bacterial strain Ascusb_1161A encodes 16S rRNA
agagtttgatcctggctcaggacgaacgctggcggcgtgcctaatacatgcaagtcgagcggtaacacagagagcttgctctcgggtgacgagcggcggacgggtgagtaatgtctgggaaactgcctgatggagggggataactactggaaacggtagctaataccgcataacgtcgcaagaccaaagtgggggaccttcgggcctcatgccatcagatgtgcc

SEQ ID NO: 4254 - DNA, 225 bp, Unknown
  bacterial strain Ascusb_20052C encodes 16S rRNA
agagtttgatcatggctcaggatgaacgctagctacaggcttaacacatgcaagtcgaggggcagcataagagtagcttgctacttttgatggcgaccggcgcacgggtgcgtaacacgtatccaatctacccacggctcagggatagcctttcgaaagaaagattaatacctgatggtctcctttagggacatccctttgggagtaaagattcatcggccatgg

SEQ ID NO: 4255 - DNA, 225 bp, Unknown
  bacterial strain Ascusb_2341B encodes 16S rRNA
agagtttgatcctggctcaggatgaacgctagcgacaggcttaacacatgcaagtcgaggggcagcgcgatggtagcaataccattggcggcgaccggcgcactggtgagtaacacgtatgcgacctgccccggacagggggataaacccgggaaactgggcctaataccccatatgccgattggatgcatgtcctttcggtgaaagatccgtcggtccgggatg

SEQ ID NO: 4256 - DNA, 225 bp, Unknown
  bacterial strain Ascusb_403A encodes 16S rRNA
agagtttgatcatggctcaggacgaacgctggcggcgtgcctaacacatgcaagtcgagcgatgaagctccttcgggagtggattagcggcggacgggtgagtaacacgtgggtaacctgcctcatagaggggaatagcctcccgaaagggagattaataccgcataatgtatgagaatcgcatgatttttgtaccaaaggagtaatccgctatgagatggaccc

SEQ ID NO: 4257 - DNA, 225 bp, Unknown; identical to SEQ ID NO: 4256
  bacterial strain Ascusb_170A encodes 16S rRNA

SEQ ID NO: 4258 - DNA, 225 bp, Unknown
  bacterial strain Ascusb_360A encodes 16S rRNA
agagtttgatcctggctcaggatgaacgctagctacaggcttaacacatgcaagtcgaggggtaacatgaagaaagcttgctttctttgatgacgaccggcgcacgggtgagtatcgcgtatccaacctgcccataagtagggaatagccttgcgaaagtaagattaatgccctatggtttccgccaaagacatctgagatggaataaagatttatcgcttatgg

SEQ ID NO: 4259 - DNA, 225 bp, Unknown
  bacterial strain Ascusb_2442A encodes 16S rRNA
agagtttgatcctggctcaggatgaacgctggcggcgtgcctaacacatgcaagttgaacgaagcaatcaagacagaatccttcgggaggaagatttgattgactgagtggcggacgggtgagtaacgcgtgggtaacctgccttgtacagggggataacagttagaaatgactgctaataccgcataagcgcacagtactgcatggtacagtgtgaaaaactcc

SEQ ID NO: 4260 - DNA, 225 bp, Unknown
  bacterial strain Ascusb_15659A encodes 16S rRNA
agagtttgatcatggctcaggacgaacgctggcggcgtgcctaacacatgcaagtcgaacggggattttgtttcggcagaatcctagtggcgaacgggtgagtaacgcgtaggcaacctgccctccagacggggacaacattccgaaaggggtgctaataccggatacgaaggagccatcgcatggtggttctttgaaagatggcctctacatgtaagctatcgc

SEQ ID NO: 4261 - DNA, 225 bp, Unknown
  bacterial strain Ascusb_93A encodes 16S rRNA
agagtttgatcctggctcaggacgaacgctggcggcgtgcctaatacatgcaagtcgagcggatttgatggagagcttgctctccagagagttagcggcggacgggtgaataacacgtaggcaacctgcctgtaagactgggataactagcggaaacgttagctaataccggataatttattttctcgcatggggagataatgaaagacggagcaatctgtcact

SEQ ID NO: 4262 - DNA, 225 bp, Unknown
  bacterial strain Ascusb_619B encodes 16S rRNA
agagtttgatcatggctcaggacgaacgctggcggcgtgcctaatacatgcaagtcgagcggacttgatggagagcttgctctcctgatagttagcggcggacgggtgagtaacacgtaggcaacctgcctgtaagactgggataactagcggaaacgttagctaataccggataattcatttcatcgcatggtggaatgatgaaagacggagcaatctgtcact

SEQ ID NO: 4263 - DNA, 225 bp, Unknown
  bacterial strain Ascusb_447A encodes 16S rRNA
agagtttgatcctggctcaggacgaacgctggcggcgtgcttaacacatgcaagtcgaacggggcaattgaaagcttgcttttgagagcctagtggcaaacgggtgagtaacgcgtaggaaacctacctccgggatggggacaaccgtccgaaaggacagctaataccgaatgaagtatgactgacacatgttggttgtatgaaagatggcctctatttataagc

SEQ ID NO: 4264 - DNA, 225 bp, Unknown
  bacterial strain Ascusb_1187B encodes 16S rRNA
agagtttgatcctggctcaggacgaacgctggcggcgtgcctaacacatgcaagtcgagcgaggtgatttccctcgggaatgaacctagcggcggacgggtgagtaacacgtgggcaacctgccttatagaggggaatagcctcccgaaagggagattaataccgcataatattgaagtttcgcatgaaacttcaatcaaaggagcaatccgctataagatgggc

SEQ ID NO: 4265 - DNA, 225 bp, Unknown
  bacterial strain Ascusb_19172C encodes 16S rRNA
agagtttgatcatggctcaggacgaacgctggcggcgtgcctaatacatgcaagtcgagcggacttgatggagagcttgctctcctgagagttagcggcggacgggtgagtaacacgtaggcaacctgcccgtaagaccgggataactagcggaaacgttagctaataccggataatcaagtttctcgcatgggagacttgggaaaggcggagcaatctgtcact

SEQ ID NO: 4266 - DNA, 225 bp, Unknown; identical to SEQ ID NO: 4265
  bacterial strain Ascusb_3031B encodes 16S rRNA

SEQ ID NO: 4267 - DNA, 225 bp, Unknown
  bacterial strain Ascusb_8619B encodes 16S rRNA
agagtttgatcatggctcaggacgaacgctggcggcgtgcctaatacatgcaagtagaacgctgaagactttagcttgctaaagttggaagagttgcgaacgggtgagtaacgcgtaggtaacctgcctactagcgggggataactattggaaacagatgctaataccgcataacaatttgaatcgcatgattcaaatttaaaagatggcttcggctatcacttt

SEQ ID NO: 4268 - DNA, 225 bp, Unknown
  bacterial strain Ascusb_4126B encodes 16S rRNA
agagtttgatcctggctcaggacgaacgctggcggcgtgcctaatacatgcaagtcgagcggacctgaaggagtgcttgcactcctgatggttagcggcggacgggtgagtaacacgtaggcaacctgcccgtaagaccgggataactaccggaaacggtagctaataccggataatcaagtctctcgcatgggaggcttgggaaaggcggttctgaatttattc

SEQ ID NO: 4269 - DNA, 225 bp, Unknown
  bacterial strain Ascusb_363B encodes 16S rRNA
agagtttgatcctggctcaggacgaacgctggcggcgtgcttaacacatgcaagtcgaacgaggtgattgaaagcttgcttttgagaaccgagtggcaaacgggtgagtaacgcgtagacaacctgccgcaaagatggggacaacagtccgaaaggactgctaataccgaatgttgtgcaacttccgcatgggggatgcattaaagatggcctctacttgtaagc

SEQ ID NO: 4270 - DNA, 225 bp, Unknown
  bacterial strain Ascusb_9477B encodes 16S rRNA
agagtttgatcatggctcagattgaacgctggcggcaggcctaatacatgcaagtcgaacggtaacataagaaaagcttgcttttcttgatgacgagtggcggacgggtgagtaatatttgggaaactacctgatagagggggacaacagttggaaacgactgctaataccgcatacagccttagggtgaaagaagaaattcgctatcagatgtgcccaaacggg

SEQ ID NO: 4271 - DNA, 225 bp, Unknown; identical to SEQ ID NO: 4270
  bacterial strain Ascusb_4760B encodes 16S rRNA

SEQ ID NO: 4272 - DNA, 225 bp, Unknown
  bacterial strain Ascusb_1942A encodes 16S rRNA
agagtttgatcatggctcagattgaacgctggcggcaggcctaacacatgcaagtcgagcggtagcacagagagcttgctctcgggtgacgagcggcggacgggtgagtaatgcttggggatctggcttatggagggggataacgacgggaaactgtcgctaataccgcgtaatatcttcggattaaagggtgggactttcgggccacctgccataagatgagcc

SEQ ID NO: 4273 - DNA, 225 bp, Unknown; identical to SEQ ID NO: 4272
  bacterial strain Ascusb_2865A encodes 16S rRNA

SEQ ID NO: 4274 - DNA, 225 bp, Unknown; identical to SEQ ID NO: 4272
  bacterial strain Ascusb_3077A encodes 16S rRNA

SEQ ID NO: 4275 - DNA, 225 bp, Unknown
  bacterial strain Ascusb_9020C encodes 16S rRNA
agagtttgatcatggctcaggacgaacgctggcggcgtgcctaatacatgcaagtcgagcgaaccaataagaagcttgctttttgttggttagcggcggacgggtgagtaacacgtgggtaacctgcctgtaagaccgggataactccgggaaaccggtgctaataccggatagattatctttccgcctggagagataaggaaagatggctattgccatcactta

SEQ ID NO: 4276 - DNA, 225 bp, Unknown
  bacterial strain Ascusb_5387B encodes 16S rRNA
agagtttgatcatggctcagattgaacgctggcggcaggcctaatacatgcaagtcggacggtaacataagaaaagcttgcttttcttgatgacgagtggcggacgggtgagtaagatttgggaaactacctgatagagggggacaacagttggaaacgactgctaataccgcatacagcctcagggtgaaagaagaaattcgctatcagatgtgcccaaatggg

SEQ ID NO: 4277 - DNA, 225 bp, Unknown; identical to SEQ ID NO: 4276
  bacterial strain Ascusb_233B encodes 16S rRNA

SEQ ID NO: 4278 - DNA, 225 bp, Unknown
  bacterial strain Ascusb_1104A encodes 16S rRNA
agagtttgatcatggctcaggatgaacgctggcggcgtgcctaacacatgcaagtcgaacgagcgagagatgaaacctagtgattctcgagcgagtggcggacgggtgagtaacgcgtgggtaacctgccttacagagggggataacagtctgaaaagactgctaataccgcataagcacacagtaccgcatggtacagggtgaaaagatttatcactgtaagat

SEQ ID NO: 4279 - DNA, 225 bp, Unknown
  bacterial strain Ascusb_301C encodes 16S rRNA
agagtttgatcatggctcagattgaacgctggcggcaggcctaatacatgcaagtcgaacggtaacataagagaagcttgcttttcttgatgacgagtggcggacgggtgagtaatatttgggaaactacctgatagagggggacaacagttggaaacgactgctaataccgcatacagccttagggtgaaagaagaaattcgctatcagatgtgcccaaacggg

SEQ ID NO: 4280 - DNA, 225 bp, Unknown
  bacterial strain Ascusb_294A encodes 16S rRNA
agagtttgatcctggctcaggacgaacgctggcggcgtgcttaacacatgcaagtcgaacgggaagaaaagaaagagcttgctcttttttggattccagtggcaaacgggtgagtaacacgtaaacaacctgccttcaggatggggacaacagacggaaacgactgctaataccgaataccttccaatttccgcatggagataggaagaaagggtggcctctact

SEQ ID NO: 4281 - DNA, 217 bp, Unknown
  bacterial strain Ascusb_1549B encodes 16S rRNA
agagtttgatcatggctcaggacgaacgctggcggcgtgcctaatacatgcaagtcgagcggacttgatggagagcttgctctccagagagttagcggcggacgggtgagtaacacgtaggcaacctgcctgtaagactgggataactagcggaaacgttagctaataccggataatttattttctcgcatgggaagataatgaaagacggagcaat

SEQ ID NO: 4282 - DNA, 225 bp, Unknown
  bacterial strain Ascusb_328B encodes 16S rRNA
agagtttgatcatggctcaggacgaacgctggcggcgtgcctaatacatgcaagtcgagcggatcttttaaaagcttgcttttaaaagattagcggcggacgggtgagtaacacgtgggtaacctacctataagactgggataactccgggaaaccggtgctaatactagatagttttctagctcgcatgagttagaaaggaaagatggtttcggctatcactta

SEQ ID NO: 4283 - DNA, 225 bp, Unknown
  bacterial strain Ascusb_351C encodes 16S rRNA
agagtttgatcctggctcagattgaacgctggcggcaggcctaatacatgcaagtcgaacggtaacatagaaaaagcttgctttttctgatgacgagtggcggacgggtgagtaaagtttgggaagctacctgatagagggggacaacagttggaaacgactgctaataccgcatacagcctgagggtgaaagcagcgatgcgctatcagatgcgcccaaatggg

SEQ ID NO: 4284 - DNA, 225 bp, Unknown
  bacterial strain Ascusb_2220A encodes 16S rRNA
agagtttgatcatggctcagattgaacgctggcggcaggcctaacacatgcaagtcgaacggtaacaggaagcagcttgctgctttgctgacgagtggcggacgggtgagtaatgtctgggaaactgcctgatggagggggataactactggaaacggtagctaataccgcataacgtcgcaagaccaaagagggggaccttcgggcctcttgccatcggatgtg

SEQ ID NO: 4285 - DNA, 225 bp, Unknown; identical to SEQ ID NO: 4284
  bacterial strain Ascusb_16089A encodes 16S rRNA

SEQ ID NO: 4286 - DNA, 225 bp, Unknown
  bacterial strain Ascusb_489C encodes 16S rRNA
agagtttgatcctggctcaggacgaacgctggcggcgtgcctaatacatgcaagtcgagcggaccgacgggagcttgctcccttaggtcagcggcggacgggtgagtaacacgtgggtaacctgcctgtaagactgggataactccgggaaaccggggctaataccggatgcttgattgaaccgcatggttcaattataaaaggtggcttcggctaccacttaca

SEQ ID NO: 4287 - DNA, 225 bp, Unknown
  bacterial strain Ascusb_1224B encodes 16S rRNA
agagtttgatcatggctcaggacgaacgctggcggcgtgcctaatacatgcaagtcgagcggacctgatggagtgcttgcactcctgatggttagcggcggacgggtgagtaacacgtaggcaacctgcccgtaagactgggataactaccggaaacggtagctaataccggatacgcaagtttctcgcatgggggacttgggaaaggcggagcaatctgtcgct

SEQ ID NO: 4288 - DNA, 225 bp, Unknown
  bacterial strain Ascusb_56B encodes 16S rRNA
agagtttgatcctggctcaggacgaacgctggcggcgtgcctaatacatgcaagtcgtgcggatcttgttaaaagcttgcttttaacaagattagcggcggacgggtgagtaacacgtgggcaacctgcctgtaagaccgggataacgccgggaaaccggggctaataccggatagttttttcctccgcatggaggaaaaaggaaaggcggcttcggctgccact

SEQ ID NO: 4289 - DNA, 225 bp, Unknown
  bacterial strain Ascusb_12149B encodes 16S rRNA
agagtttgatcctggctcaggacgaacgctggcggcgtgcttaacacatgcaagtcgaacgaagagcgacggaagcttgcttctatcaatcttagtggcgaacgggtgagtaacgcgtaatcaacctgcccttcagagggggacaacagttggaaacgactgctaataccgcatacgatctgacctcggcatcgaggatggatgaaaggtggcctctacatgtaa

SEQ ID NO: 4290 - DNA, 225 bp, Unknown
  bacterial strain Ascusb_701A encodes 16S rRNA
agagtttgatcatggctcagattgaacgctggcggcaggcctaatacatgcaagtcgaacggtaacataagagaagcttgcttttcttgatgacgagtggcggacgggtgagtaatatttgggaaactacctgatagagggggacaacagttggaaacgactgctaataccgcatacagcctcagggtgaaagaagaaattcgctatcagatgtgcccaaacggg

SEQ ID NO: 4291 - DNA, 225 bp, Unknown; identical to SEQ ID NO: 4290
  bacterial strain Ascusb_3805B encodes 16S rRNA

SEQ ID NO: 4292 - DNA, 225 bp, Unknown
  bacterial strain Ascusb_13271C encodes 16S rRNA
agagtttgatcatggctcaggacgaacgctggcggcgtgcctaatacatgcaagtcgagcggagttgatgaggtgcttgcacctctgatgcttagcggcggacgggtgagtaacacgtaggcaacctgcccgtaagaccgggataactagcggaaacgttagctaataccggataatcaaggtttccgcatggaagccttgggaaaggcggttctgatctaatca

SEQ ID NO: 4293 - DNA, 225 bp, Unknown
  bacterial strain Ascusb_2017B encodes 16S rRNA
agagtttgatcatggctcaggatgaacgctggcggcgtgcctaatacatgcaagtcgagcgagaaattctttaatgaatcttcggaggatttagagaatgggcagcggcggacgggtgagtaacgcgtaggcaacctgcctcacacagagggatagccattggaaacgatgaataatacctcatgaaaccggaacaacacatgttgatccggtcaaagatttatc

SEQ ID NO: 4294 - DNA, 225 bp, Unknown
  bacterial strain Ascusb_3981A encodes 16S rRNA
agagtttgatcctggctcaggacgaacgctggcggcgtgcctaatacatgcaagtcgaacgaactctggtattgattggtgcttgcatcatgatttacatttgagtgagtggcgaactggtgagtaacacgtgggaaacctgcccagaagcgggggataacacctggaaacagatgctaataccgcataacaacttggaccgcatggtccgagcttgaaagatgg

SEQ ID NO: 4295 - DNA, 225 bp, Unknown; identical to SEQ ID NO: 4294
  bacterial strain Ascusb_4041A encodes 16S rRNA

SEQ ID NO: 4296 - DNA, 225 bp, Unknown
  bacterial strain Ascusb_1179D encodes 16S rRNA
agagtttgatcctggctcaggacgaacgctggcggcgtgcctaatacatgcaagtggaacgcatgattgataccgtagcttgctacaccattaatcatgagtcgcgaacgggtgagtaacgcgtaggtaacctaccttctagcgggggataactattggaaacgatagctaataccgcataacagtttttaacacatgttagaaatttgaaaggagcaattgctt

SEQ ID NO: 4297 - DNA, 225 bp, Unknown; identical to SEQ ID NO: 4296
  bacterial strain Ascusb_534C encodes 16S rRNA

SEQ ID NO: 4298 - DNA, 225 bp, Unknown; identical to SEQ ID NO: 4296
  bacterial strain Ascusb_16442B encodes 16S rRNA

SEQ ID NO: 4299 - DNA, 225 bp, Unknown; identical to SEQ ID NO: 4296
  bacterial strain Ascusb_1287A encodes 16S rRNA

SEQ ID NO: 4300 - DNA, 225 bp, Unknown; identical to SEQ ID NO: 4213
  bacterial strain Ascusb_1508B encodes 16S rRNA

SEQ ID NO: 4301 - DNA, 225 bp, Unknown
  bacterial strain Ascusb_17652C encodes 16S rRNA
agagtttgatcatggctcaggatgaacgctggcggcgtgcttaacacatgcaagtcgagcgaagcactttacttggatttcttcggaaagaagagtgttgtgactgagcggcggacgggtgagtaacgcgtgggtaacctgcctcatacagggggataacagtcagaaatgactgctaataccgcataagaccgcagtaccgcatggtacagtggtaaaaactcc

SEQ ID NO: 4302 - DNA, 225 bp, Unknown; identical to SEQ ID NO: 4293
  bacterial strain Ascusb_1368B encodes 16S rRNA

SEQ ID NO: 4303 - DNA, 225 bp, Unknown; identical to SEQ ID NO: 4293
  bacterial strain Ascusb_12394B encodes 16S rRNA

SEQ ID NO: 4304 - DNA, 225 bp, Unknown; identical to SEQ ID NO: 4293
  bacterial strain Ascusb_1332B encodes 16S rRNA

SEQ ID NO: 4305 - DNA, 225 bp, Unknown; identical to SEQ ID NO: 4293
  bacterial strain Ascusb_9039B encodes 16S rRNA

SEQ ID NO: 4306 - DNA, 225 bp, Unknown
  bacterial strain Ascusb_2191D encodes 16S rRNA
agagtttgatcatggctcaggacgaacgctggcggcgtgcctaatacatgcaagtcgtgcggaccttttaaaagcttgcttttaaaaggttagcggcggacgggtgagtaacacgtgggcaacctgcctgtaagatcgggataacaccgggaaaccggggctaataccggatagttttttcctccgcatggaggaaaaaggaaagacggcttcggctgtcactta

SEQ ID NO: 4307 - DNA, 225 bp, Unknown
  bacterial strain Ascusb_1666A encodes 16S rRNA
agagtttgatcctggctcaggacgaacgctggcggcgtgcctaacacatgcaagtcgaacggagtgatttgaaagcttgcttttgaatcacttagtggcggacgggtgagtaacgcgtgagtaacctgcctttcagagggggataacatcctgaaaaggatgctaataccgcataacatatcgaggccgcatggcattggtatcaaaggagcaatccgctgagag

SEQ ID NO: 4308 - DNA, 225 bp, Unknown
  bacterial strain Ascusb_3810B encodes 16S rRNA
agagtttgatcatggctcagattgaacgctggcggcaggcctaacacatgcaagtcgaacggtagcacagaggagcttgctccttgggtgacgagtggcggacgggtgagtaatgtctgggaaactgcccgatggagggggataactactggaaacggtagctaataccgcataacgtcgcaagaccaaagagggggaccttcgggcctcttgccatcggatgtg

SEQ ID NO: 4309 - DNA, 225 bp, Unknown
  bacterial strain Ascusb_4058C encodes 16S rRNA
agagtttgatcctggctcaggacgaacgctggcggcgtgcctaatacatgcaagtcgagcggacctgatggagtgcttgcactcctgatggttagcggcggacgggtgagtaacacgtaggcaacctgcccgtaagaccgggataactaccggaaacggtagctaataccggataatcaagtcttccgcatgggagacttgggaaaggcggagcaatctgtcact

SEQ ID NO: 4310 - DNA, 225 bp, Unknown
  bacterial strain Ascusb_544B encodes 16S rRNA
agagtttgatcctggctcaggatgaacgctagctacaggcttaacacatgcaagtcgaggggtaacatgaagaaagcttgctttctttgatgacgaccggcgcacgggtgagtatcgcgtatccaacctgcccataagtagggaatagccttgcgaaagtaagattaatgccctatggtttccgttaaagacatctgagatggaataaagatttatcgcttatgg

SEQ ID NO: 4311 - DNA, 225 bp, Unknown; identical to SEQ ID NO: 4310
  bacterial strain Ascusb_3334A encodes 16S rRNA

SEQ ID NO: 4312 - DNA, 225 bp, Unknown; identical to SEQ ID NO: 4310
  bacterial strain Ascusb_9646A encodes 16S rRNA

SEQ ID NO: 4313 - DNA, 225 bp, Unknown
  bacterial strain Ascusb_15140B encodes 16S rRNA
agagtttgatcctggctcaggacgaacgctggcggcgtgcttaacacatgcaagtcgaacgaagagcgatggaagcttgcttctatcaatcttagtggcgaacgggtgagtaacgcgtaatcaacctgcccttcagagggggacaacagttggaaacgactgctaataccgcatacgatctgacctcggcatcgaggatggatgaaaggtggcctctacatgtaa

SEQ ID NO: 4314 - DNA, 225 bp, Unknown; identical to SEQ ID NO: 4313
  bacterial strain Ascusb_16891C encodes 16S rRNA

SEQ ID NO: 4315 - DNA, 225 bp, Unknown; identical to SEQ ID NO: 4306
  bacterial strain Ascusb_3089D encodes 16S rRNA

SEQ ID NO: 4316 - DNA, 225 bp, Unknown; identical to SEQ ID NO: 4306
  bacterial strain Ascusb_798A encodes 16S rRNA

SEQ ID NO: 4317 - DNA, 225 bp, Unknown; identical to SEQ ID NO: 4306
  bacterial strain Ascusb_994B encodes 16S rRNA

SEQ ID NO: 4318 - DNA, 225 bp, Unknown
  bacterial strain Ascusb_3554B encodes 16S rRNA
agagtttgatcctggctcaggacgaacgctggcggcgtgcctaatacatgcaagtcgagcggacctgatggagtgcttgcactcctgacggttagcggcggacgggtgagtaacacgtaggcaacctgcccgtaagaccgggataactaccggaaacggtagctaataccggataatcaagtcttccgcatgggaggcttgggaaaggcggttctgaatttattc

SEQ ID NO: 4319 - DNA, 225 bp, Unknown
  bacterial strain Ascusb_1040B encodes 16S rRNA
agagtttgatcatggctcagattgaacgctggcggcaggcctaatacatgcaagtcggacggtaacataagaaaagcttgcttttcttgatgacgagtggcggacgggtgagtaagatttgggaaactacctgatagagggggacaacagttggaaacgactgctaataccgcatacagcctcagggtgaaagaagaaattcgctatcagatgtgcccaaacggg

SEQ ID NO: 4320 - DNA, 225 bp, Unknown; identical to SEQ ID NO: 4263
  bacterial strain Ascusb_20164A encodes 16S rRNA

SEQ ID NO: 4321 - DNA, 225 bp, Unknown
  bacterial strain Ascusb_679A encodes 16S rRNA
agagtttgatcatggctcaggacgaacgctggcggcgtgcctaatacatgcaagtcgagcggacttgatggagagcttgctctccagagagttagcggcggacgggtgagtaacacgtaggcaacctgcctgtaagactgggataactagcggaaacgttagctaataccggataatttattttctcgcatgaggagataatgaaagacggagcaatctgtcact

SEQ ID NO: 4322 - DNA, 225 bp, Unknown
  bacterial strain Ascusb_150B encodes 16S rRNA
agagtttgatcctggctcaggacgaacgctggcggcgtgcctaatacatgcaagtcgagcggacttgatggagagcttgctctccagaaagttagcggcggacgggtgagtaacacgtaggcaacctgcctgtaagactgggataactagcggaaacgttagctaataccggataatttattttctcgcatgaggagataatgaaagacggagcaatctgtcact

SEQ ID NO: 4323 - DNA, 225 bp, Unknown; identical to SEQ ID NO: 4322
  bacterial strain Ascusb_2378B encodes 16S rRNA

SEQ ID NO: 4324 - DNA, 225 bp, Unknown
  bacterial strain Ascusb_1882B encodes 16S rRNA
agagtttgatcctggctcaggacgaacgctggcggcgtgcctaatacatgcaagtcgagcggacctgatggagtgcttgcactcctgatggttagcggcggacgggtgagtaacacgtgggtaacctgcctcaaagtgggggatagccttccgaaaggaagattaataccgcataatatgagagaatcgcatgattttcttatcaaagatttattgctttgagat

SEQ ID NO: 4325 - DNA, 225 bp, Unknown
  bacterial strain Ascusb_1675A encodes 16S rRNA
agagtttgatcctggctcaggacgaacgctggcggcgtgcctaatacatgcaagtcgagcggaccgacgggagcttgctcccttaggtcagcggcggacgggtgagtaacacgtgggtaacctgcctgtaagactgggataactccgggaaaccggggctaataccggatgcttgattgaaccgcatggtttaattataaaaggtggcttttagctaccacttac

SEQ ID NO: 4326 - DNA, 225 bp, Unknown; identical to SEQ ID NO: 4325
  bacterial strain Ascusb_18852A encodes 16S rRNA

SEQ ID NO: 4327 - DNA, 225 bp, Unknown; identical to SEQ ID NO: 4325
  bacterial strain Ascusb_5045A encodes 16S rRNA

SEQ ID NO: 4328 - DNA, 225 bp, Unknown; identical to SEQ ID NO: 4325
  bacterial strain Ascusb_3680B encodes 16S rRNA

SEQ ID NO: 4329 - DNA, 225 bp, Unknown; identical to SEQ ID NO: 4325
  bacterial strain Ascusb_2536A encodes 16S rRNA

SEQ ID NO: 4330 - DNA, 225 bp, Unknown; identical to SEQ ID NO: 4207
  bacterial strain Ascusb_1715C encodes 16S rRNA

SEQ ID NO: 4331 - DNA, 225 bp, Unknown
  bacterial strain Ascusb_1340B encodes 16S rRNA
agagtttgatcctggctcaggacgaacgctggcggcgtgcctaatacatgcaagtagaacgctgaagactttagcttgctaaagttggaagagttgcgaacgggtgagtaacgcgtaggtaacctgccccaaagcgggggataacatttggaaacagatgctaataccgcataacaatttgaatcgcatgattcaaatttaaaagatggtttcggctatcacttt

SEQ ID NO: 4332 - DNA, 225 bp, Unknown; identical to SEQ ID NO: 4153
  bacterial strain Ascusb_818A encodes 16S rRNA

SEQ ID NO: 4333 - DNA, 225 bp, Unknown
  bacterial strain Ascusb_1278B encodes 16S rRNA
agagtttgatcatggctcaggacgaacgctggcggcgtgcctaatacatgcaagtcgagcgatatctttgggggcttgcccccgaagatgtagcggcggacgggtgagtaacacgtgggcaacctgcctgtaagactgggataacttcgggaaaccggagctaataccggataactcaagaaaccacatggtttcttgctaaaagatggctccggctatcactta

SEQ ID NO: 4334 - DNA, 225 bp, Unknown
  bacterial strain Ascusb_18804B encodes 16S rRNA
agagtttgatcctggctcaggatgaacgctggcggcgtgcttaacacatgcaagtcgaacggagtttataagcggagcccttcggggcaaagcttataaacttagtggcggacgggtgagtaacgcgtgggtaacctgccttacacagggggataacaactggaaacggttgctaataccgcataagcgcacagcatcgcatgatgcagtgtgaaaagatttatc

SEQ ID NO: 4335 - DNA, 225 bp, Unknown
  bacterial strain Ascusb_1532C encodes 16S rRNA
agagtttgatcctggctcaggatgaacgctggcggcgtgcctaatacatgcaagtcgagcgaatgaattaagagcttgctcttatgaagttagcggcggacgggtgagtaacacgtgggtaacctgcccataagactgggataactccgggaaaccggggctaataccggataacattttgaactgcatggttcgaaattgaaaggcggcttcggctgtcactta

SEQ ID NO: 4336 - DNA, 225 bp, Unknown
  bacterial strain Ascusb_1760B encodes 16S rRNA
agagtttgatcatggctcaggacgaacgctggcggcgtgcctaatacatgcaagtcgagcggagtttatcgggagcttgctcctgataaacttagcggcggacgggtgagtaacacgtaggcaacctgcccgtaagactgggataactaccggaaacggtagctaataccggatacgcaagtctctcgcatgagggacttgggaaaggcggagcaatctgtcact

SEQ ID NO: 4337 - DNA, 225 bp, Unknown
  bacterial strain Ascusb_626A encodes 16S rRNA
agagtttgatcctggctcaggacgaacgctggcggcgtgcttaacacatgcaagtcgaacggggcaattgaaagcttgcttttgagagcctagtggcaaacgggtgagtaacgcgtaggaaacctgcctccgggatggggacaaccgtccgaaaggacagctaataccgaatgaagtacacttgacacatgtcgggtgtatgaaagatggcctctatttataagc

SEQ ID NO: 4338 - DNA, 225 bp, Unknown
  bacterial strain Ascusb_21571B encodes 16S rRNA
agagtttgatcctggctcaggatgaacgctagctacaggcttaacacatgcaagtcgaggggaaacgacatagagtgcttgcactttatgggcgtcgaccggcgaatgggtgagtaacgcgtatccaacctgcccttgactgagggatagcccagtgaaaactgaattaatacctcatgtactcctcagacggcatcagacgaggagcaaagattaatcggtcaa

SEQ ID NO: 4339 - DNA, 225 bp, Unknown
  bacterial strain Ascusb_822A encodes 16S rRNA
agagtttgatcatggctcaggacgaacgctggcggcgtgcctaatacatgcaagtcgagcgaatctgagggagcttgctcctaaagattagcggcggacgggtgagtaacacgtgggcaacctgcctgtaagactgggataacttcgggaaaccggagctaataccggataactcaagaaaccaaatggtttcttgctaaaagatggctccggctatcacttaca

SEQ ID NO: 4340 - DNA, 225 bp, Unknown
  bacterial strain Ascusb_1829B encodes 16S rRNA
agagtttgatcatggctcaggacgaacgctggcggcgtgcctaatacatgcaagtcgagcgaaccgacgggagcttgctcccttaggttagcggcggacgggtgagtaacacgtgggtaacctgcctgtaagactgggataactccgggaaaccggggctaataccggatgcttgattgaaccgcatggttcaattataaaaggtggcttttagctaccacttac

SEQ ID NO: 4341 - DNA, 225 bp, Unknown; identical to SEQ ID NO: 4340
  bacterial strain Ascusb_2744B encodes 16S rRNA

SEQ ID NO: 4342 - DNA, 225 bp, Unknown; identical to SEQ ID NO: 4340
  bacterial strain Ascusb_1889C encodes 16S rRNA

SEQ ID NO: 4343 - DNA, 225 bp, Unknown
  bacterial strain Ascusb_300C encodes 16S rRNA
agagtttgatcatggctcaggacgaacgctggcggcgtgcctaatacatgcaagtcgagcggagttaattaggagcttgctcttgattaacttagcggcggacgggtgagtaacacgtaggcaacctgcccgtaagactgggataactaccggaaacggtagctaataccggatacgcaagtttctcgcatgggggacttgggaaaggcggagcaatctgtcact

SEQ ID NO: 4344 - DNA, 225 bp, Unknown; identical to SEQ ID NO: 4343
  bacterial strain Ascusb_1101B encodes 16S rRNA

SEQ ID NO: 4345 - DNA, 225 bp, Unknown; identical to SEQ ID NO: 4343
  bacterial strain Ascusb_813C encodes 16S rRNA

SEQ ID NO: 4346 - DNA, 225 bp, Unknown; identical to SEQ ID NO: 4343
  bacterial strain Ascusb_9659A encodes 16S rRNA

SEQ ID NO: 4347 - DNA, 225 bp, Unknown
  bacterial strain Ascusb_2648B encodes 16S rRNA
agagtttgatcatggctcaggatgaacgctggcggcgtgcttaacacatgcaagtcgaacggagttaataagcggaagtcttcggatggaagcttattaacttagtggcggacgggtgagtaacgcgtgggtaacctgccttatacagggggataacagccggaaacggttgctaataccgcataagcacacagtgccgcatggtacagtgtgaaaagatttatc

SEQ ID NO: 4348 - DNA, 225 bp, Unknown; identical to SEQ ID NO: 4347
  bacterial strain Ascusb_4062B encodes 16S rRNA

SEQ ID NO: 4349 - DNA, 225 bp, Unknown; identical to SEQ ID NO: 4347
  bacterial strain Ascusb_1276B encodes 16S rRNA

SEQ ID NO: 4350 - DNA, 225 bp, Unknown; identical to SEQ ID NO: 4103
  bacterial strain Ascusb_726A encodes 16S rRNA

SEQ ID NO: 4351 - DNA, 225 bp, Unknown; identical to SEQ ID NO: 310
  bacterial strain Ascusb_927B encodes 16S rRNA

SEQ ID NO: 4352 - DNA, 225 bp, Unknown
  bacterial strain Ascusb_355B encodes 16S rRNA
agagtttgatcctggctcaggatgaacgccggcggtgtgcctaatacatgcaagtcgaacgcgttggcccaactgattgaacgtgcttgcacggacttgacgttggtttaccaacgagtggcggacgggtgagtaacacgtaggtaacctgccccaaagcgggggataacatttggaaacagatgctaataccgcataacaatttgaatcgcatgattcaaattt

SEQ ID NO: 4353 - DNA, 225 bp, Unknown
  bacterial strain Ascusb_7910B encodes 16S rRNA
agagtttgatcatggctcaggatgaacgctagctacaggcttaacacatgcaagtcgaggggaaacgatattggaagcttgcttccgataggcgtcgaccggcgcacgggtgagtaacgcgtatccaacctgcccgtcacttgggaataaccttgcgaaagtaagactaatgcccaatgacatttatagaaggcatctgaaatgaattaaagatttatcggtgat

SEQ ID NO: 4354 - DNA, 225 bp, Unknown
  bacterial strain Ascusb_1230A encodes 16S rRNA
agagtttgatcatggctcagattgaacgctggcggcaggcctaatacatgcaagtcggacggtaacataagaaaagcttgcttttcttgatgacgagtggcggacgggtgagtaatatttgggaagctacctgatagagggggacaacagttggaaacgactgctaataccgcatacagccttagggtgaaagaagaaattcgctatcagatgtgcccaaacggg

SEQ ID NO: 4355 - DNA, 225 bp, Unknown
  bacterial strain Ascusb_794A encodes 16S rRNA
agagtttgatcctggctcaggacgaacgctggcggcgtgcctaacacatgcaagtcgagcggagttacctttagcactgagcattcttaataatatgatgctgatagccagcgtcttgcgaagcttaaagcgagcaatacgcgttttatcttgtgttcgaagaacactgggacagcacatgtaagagaagagtgttgagtgctaaagggagcttagcggcggacg

SEQ ID NO: 4356 - DNA, 225 bp, Unknown
  bacterial strain Ascusb_4971C encodes 16S rRNA
agagtttgatcatggctcagattgaacgctggcggcaggcctaatacatgcaagtcggacggtaacataagaaaagcttgcttttcttgatgacgagtggcggacgggtgagtaagatttgggaagctacctgatagagggggacaacagttggaaacgactgctaataccgcatacagcctcagggtgaaagaagaaattcgctatcagatgtgcccaaacggg

SEQ ID NO: 4357 - DNA, 225 bp, Unknown
  bacterial strain Ascusb_218A encodes 16S rRNA
agagtttgatcatggctcagattgaacgctggcggcaggcctaatacatgcaagtcggacggtaacataagaaaagcttgcttttcttgatgacgagtggcggacgggtgagtaatatttgggaaactacctgatagagggggacaacagttggaaacgactgctaataccgcatacagccttagggtgaaagaagaaattcgctatcagatgtgcccaaacggg

SEQ ID NO: 4358 - DNA, 225 bp, Unknown
  bacterial strain Ascusb_1630C encodes 16S rRNA
agagtttgatcatggctcaggacgaacgctggcggcgtgcctaacacatgcaagtcgagcggagttacctttagcactgagcattcttaataatatgatgctgatagccagcgtcttgcgaagcttaaagcgagcaatacgcgttttatcttgtgttcgaagaacactggaacagtacatgtaagagaagagtgttgagtgctaaaggcagcttagcggcggacg

SEQ ID NO: 4359 - DNA, 225 bp, Unknown
  bacterial strain Ascusb_4081C encodes 16S rRNA
agagtttgatcatggctcaggacgaacgctggcggcatgcctaatacatgcaagtcgaacgagcttccgttgaatgacgtgcttgcactgatttcaacaatgaagcgagtggcgaactggtgagtaacacgtggggaatctgcccagaagcaggggataacacttggaaacaggtgctaataccgtataacaacaaaatccgcatggattttgtttgaaaggtgg

SEQ ID NO: 4360 - DNA, 225 bp, Unknown
  bacterial strain Ascusb_5201C encodes 16S rRNA
agagtttgatcctggctcaggacgaacgctggcggcgtgcttaacacatgcaagtcgagcgatgaagcttccttcgggaagtggattagcggcggacgggtgagtaacacgtgggcaacctgcctcaaagagaggaatagccctccgaaaggaggattaataccgcataaagttagagtttcgcatgaaactttaaccaaaggagtaatccgctttgagatgggc

SEQ ID NO: 4361 - DNA, 225 bp, Unknown
  bacterial strain Ascusb_865A encodes 16S rRNA
agagtttgatcctggctcaggatgaacgctagctacaggcttaacacatgcaagtcgaggggaaacgacagagagtgcttgcactttttgggcgtcgaccggcgaatgggtgagtaacgcgtatccaacctgcccttgactgagggatagcccagtgaaaactgaattaatacctcatgttctcctcagacggcatcagacgaggagtaaagattaatcggtcaa

SEQ ID NO: 4362 - DNA, 225 bp, Unknown
  bacterial strain Ascusb_251B encodes 16S rRNA
agagtttgatcctggctcaggacgaacgctggcggcgtgcctaatacatgcaagtcgagcggacttgatggagagcttgctctcctgatagttagcggcggacgggtgagtaacacgtaggcaacctgcctgtaagactgggataactagcggaaacgttagctaataccggataatttatttcatcgcatggtggaataatgaaagacggagcaatctgtcact

SEQ ID NO: 4363 - DNA, 225 bp, Unknown; identical to SEQ ID NO: 4347
  bacterial strain Ascusb_6130B encodes 16S rRNA

SEQ ID NO: 4364 - DNA, 225 bp, Unknown
  bacterial strain Ascusb_51C encodes 16S rRNA
agagtttgatcatggctcaggacgaacgctggcggcgtgcctaatacatgcaagtcgagcggagttaattaggagcttgctcttgattaacttagcggcggacgggtgagtaacacgtaggcaacctgcccgtaagactgggataactaccggaaacggtagctaataccggatacgcaagtttctcgcatgggagacttgggaaaggcggagcaatctgtcact

SEQ ID NO: 4365 - DNA, 225 bp, Unknown
  bacterial strain Ascusb_17128C encodes 16S rRNA
agagtttgatcatggctcaggacgaacgctggcggcgtgcctaatacatgcaagtcgagcggacctgatggagtgcttgcactcctgatggttagcggcggacgggtgagtaacacgtaggcaacctgcccgtaagaccgggataactaccggaaacggtagctaataccggataatcaagtcttccgcatgggagacttgggaaaggcggagcaatctgtcact

SEQ ID NO: 4366 - DNA, 225 bp, Unknown; identical to SEQ ID NO: 4365
  bacterial strain Ascusb_57C encodes 16S rRNA

SEQ ID NO: 4367 - DNA, 225 bp, Unknown
  bacterial strain Ascusb_3349C encodes 16S rRNA
agagtttgatcatggctcaggacgaacgctggcggcgtgcttaacacatgcaagtcgaacgagacgattgaaagcttgcttttgagagtcgagtggcaaacgggtgagtaacgcgtagacaacctgccgcaaagatggggacaacagtccgaaaggactgctaataccgaatgttgtgcaatctccgcatggaggatgcattaaagatggcctctacttgtaagc

SEQ ID NO: 4368 - DNA, 225 bp, Unknown
  bacterial strain Ascusb_725C encodes 16S rRNA
agagtttgatcatggctcaggatgaacgctagctacaggcttaacacatgcaagtcgaggggaaacgatgcggaagcttgcttccgcaggcgtcgaccggcgcacgggtgagtaacgcgtatccaacctgccccgaggtagggaataatccgtagaaatgcggtctaataccttatgtgctccgaagaggacatctgatttggagtaaagatttatcgccttggg

SEQ ID NO: 4369 - DNA, 225 bp, Unknown
  bacterial strain Ascusb_7360C encodes 16S rRNA
agagtttgatcctggctcaggacgaacgctggcggcgtgcctaatacatgcaagtcgaacgcatcccgctgaattgaagtgcttgcactgattttcagcattggatgagtggcgaactggtgagtaacacgtgggtaacctgcccggaagcaggggataacacttggaaacaggtgctaataccgtataacaactgaaaccgcatggtttcagtttgaaagatgg

SEQ ID NO: 4370 - DNA, 225 bp, Unknown; identical to SEQ ID NO: 4369
  bacterial strain Ascusb_15382B encodes 16S rRNA

SEQ ID NO: 4371 - DNA, 225 bp, Unknown
  bacterial strain Ascusb_386C encodes 16S rRNA
agagtttgatcatggctcaggacgaacgctggcggcgtgcctaacacatgcaagtcgagcgaggagattcccttcggggatgaacctagcggcggacgggtgagtaacacgtgggcaacctgccttatagaggggaatagccttccgaaaggaagattaataccgcataacattacattttcgcatgaagaagtaattaaaggagcaatccgctataagatgggc

SEQ ID NO: 4372 - DNA, 225 bp, Unknown; identical to SEQ ID NO: 4371
  bacterial strain Ascusb_1419C encodes 16S rRNA

SEQ ID NO: 4373 - DNA, 225 bp, Unknown
  bacterial strain Ascusb_1867B encodes 16S rRNA
agagtttgatcatggctcaggacgaacgctggcggcgtgcctaatacatgcaagtcgagcgatatctttgggggcttgcccccgaagatgtagcggcggacgggtgagtaacacgtgggcaacctgcctgtaagactgggataacttcgggaaaccggagctaataccggataactcaagaaaccacatggtttcttgctaaaagatggctccagctatcactta

SEQ ID NO: 4374 - DNA, 225 bp, Unknown; identical to SEQ ID NO: 4373
  bacterial strain Ascusb_3294B encodes 16S rRNA

SEQ ID NO: 4375 - DNA, 225 bp, Unknown; identical to SEQ ID NO: 4294
  bacterial strain Ascusb_2831B encodes 16S rRNA

SEQ ID NO: 4376 - DNA, 225 bp, Unknown
  bacterial strain Ascusb_1716A encodes 16S rRNA
agagtttgatcctggctcaggacgaacgctggcggcgtgcctaatacatgcaagtcgagcggacctgatggagtgcttgcactcctgatggttagcggcggacgggtgagtaacacgtaggcaacctgcccgtaagaccgggataactaccggaaacggtagctaataccggataatcaagcctctcgcatgagaagcttgggaaaggcggagcaatctgtcact

SEQ ID NO: 4377 - DNA, 225 bp, Unknown
  bacterial strain Ascusb_120C encodes 16S rRNA
agagtttgatcatggctcaggacgaacgctggcggcgtgcctaacacatgcaagtcgagcgaggagattcctttcggggatgaacctagcggcggacgggtgagtaacacgtgggcaacctgccttatagagggggatagcctcccgaaagggagattaataccgcataacattgaagtttcgcatgaagcatcaatcaaaggagcaatccgctataagatgggc

SEQ ID NO: 4378 - DNA, 225 bp, Unknown
  bacterial strain Ascusb_1149B encodes 16S rRNA
agagtttgatcctggctcaggacgaacgctggcggcgtgcctaacacatgcaagtcgaacggagtgattcgaaagcttgcttttgaatcacttagtggcggacgggtgagtaacgcgtgagtaacctgcctttcagagggggataacatcctgaaaaggatgctaataccgcatgacatatcgaggccgcatggtcttggtatcaaaggagcaatccgctgagag

SEQ ID NO: 4379 - DNA, 225 bp, Unknown; identical to SEQ ID NO: 4103
  bacterial strain Ascusb_2710B encodes 16S rRNA

SEQ ID NO: 4380 - DNA, 225 bp, Unknown; identical to SEQ ID NO: 4103
  bacterial strain Ascusb_5711B encodes 16S rRNA

SEQ ID NO: 4381 - DNA, 225 bp, Unknown
  bacterial strain Ascusb_548A encodes 16S rRNA
agagtttgatcctggctcaggacgaacgctggcggcgtgcctaatacatgcaagtcgaacgcgtctccgttaatgattttaggtgcttgcacttgaaagatttaacattgagacgagtggcgaactggtgagtaacacgtgggtaacctgcccttgaagtaggggataacacttggaaacaggtgctaataccgtataacaaccaaaaccacctggttttggttt

SEQ ID NO: 4382 - DNA, 225 bp, Unknown
  bacterial strain Ascusb_2917B encodes 16S rRNA
agagtttgatcctggctcaggacgaacgctggcggcgtgcctaatacatgcaagtcgagcgagctgaattcaaagatcccttcggggtgatttgttggatgctagcggcggatgggtgagtaacacgtgggcaatctgccctaaagactgggataccacttggaaacaggtgctaataccggataacaacatgaatcgcatgattcaagtttgaaaggcggcgta

SEQ ID NO: 4383 - DNA, 225 bp, Unknown; identical to SEQ ID NO: 4382
  bacterial strain Ascusb_555B encodes 16S rRNA

SEQ ID NO: 4384 - DNA, 225 bp, Unknown
  bacterial strain Ascusb_2255C encodes 16S rRNA
agagtttgatcatggctcaggacgaacgctggcggcgtgcttaacacatgcaagtcgaacgaagagcgatggaagcttgcttctatcaatcttagtggcgaacgggtgagtaacgcgtaatcaacctgcccttcagagggggacaacagttggaaacgactgctaataccgcatacgatctgacctcggcatcgaggatggatgaaaggtggcctctacatgtaa

SEQ ID NO: 4385 - DNA, 225 bp, Unknown
  bacterial strain Ascusb_4938B encodes 16S rRNA
agagtttgatcatggctcaggacgaacgctggcggcgtgcctaatacatgcaagtcgagcgaaccaataagaagcttgctttttgttggttagcggcggacgggtgagtaacacgtgggtaacctgcctgtaagatcgggataactccgggaaaccggtgctaataccggatagattatctttccgcctggagagataaggaaagatggctattgccatcactta

SEQ ID NO: 4386 - DNA, 225 bp, Unknown; identical to SEQ ID NO: 4385
  bacterial strain Ascusb_5705A encodes 16S rRNA

SEQ ID NO: 4387 - DNA, 225 bp, Unknown
  bacterial strain Ascusb_186A encodes 16S rRNA
agagtttgatcctggctcaggacgaacgctggcggcgtgcctaacacatgcaagtcgagcgatgaaacccttcggggtgaattagcggcggacgggtgagtaacacgtgggtaacctgccttatagagggggatagccttccgaaaggaagattaataccgcatgaaatgtttttatcgcatggtagaaacatcaaaggagtaatccgctataagatggacccgc

SEQ ID NO: 4388 - DNA, 225 bp, Unknown; identical to SEQ ID NO: 4387
  bacterial strain Ascusb_371A encodes 16S rRNA

SEQ ID NO: 4389 - DNA, 225 bp, Unknown
  bacterial strain Ascusb_2432C encodes 16S rRNA
agagtttgatcctggctcaggatgaacgctggcggcgtgcttaacacatgcaagtcgaacgaagcatttaaaacggatttcttcgggatgaagttttttatgactgagtggcggacgggtgagtaacgcgtgggtaacctgcctcacacagggggatagcagttggaaacgactggtaataccgcataagcgcacagcttcgcatgaagcggtgtgaaaaactcc

SEQ ID NO: 4390 - DNA, 225 bp, Unknown
  bacterial strain Ascusb_338B encodes 16S rRNA
agagtttgatcatggctcaggacgaacgctggcggcgtgcctaatacatgcaagtcgagcggacctgatggagtgcttgcactcctgatggttagcggcggacgggtgagtaacacgtaggcaacctgcccgtaagaccgggataactaccggaaacggtagctaataccggatacgcaagtctatcgcatggtggacttgggaaaggcggagcaatctgtcact

SEQ ID NO: 4391 - DNA, 225 bp, Unknown
  bacterial strain Ascusb_3092C encodes 16S rRNA
agagtttgatcctggctcaggacgaacgctggcggcgtgcttaacacatgcaagtcgtacgaggcagattttcatcactgaactttaaagagcggactgatgagaggcgtcgtgaatgcgaagcattcaccacacttttataaagtgcttaactttaaggctgagtgatgaaaagatgccgagtggcaaacgggtgagtaacgcgtagacaacctgccgtaaaga

SEQ ID NO: 4392 - DNA, 225 bp, Unknown; identical to SEQ ID NO: 4391
  bacterial strain Ascusb_15051B encodes 16S rRNA

SEQ ID NO: 4393 - DNA, 225 bp, Unknown; identical to SEQ ID NO: 4391
  bacterial strain Ascusb_1985D encodes 16S rRNA

SEQ ID NO: 4394 - DNA, 225 bp, Unknown; identical to SEQ ID NO: 4391
  bacterial strain Ascusb_4173B encodes 16S rRNA

SEQ ID NO: 4395 - DNA, 225 bp, Unknown; identical to SEQ ID NO: 4391
  bacterial strain Ascusb_14185C encodes 16S rRNA

SEQ ID NO: 4396 - DNA, 225 bp, Unknown
  bacterial strain Ascusb_4975C encodes 16S rRNA
agagtttgatcatggctcagattgaacgctggcggcaggcctaatacatgcaagtcggacggtaacataagaaaagcttgcttttcttgatgacgagtggcggacgggtgagtaatatttgggaagctacctgatagagggggacaacagttggaaacgactgctaataccgcatacagccttagggtgaaagaagaaattcgctatcagatgtgcccaaatggg

SEQ ID NO: 4397 - DNA, 225 bp, Unknown
  bacterial strain Ascusb_1195B encodes 16S rRNA
agagtttgatcctggctcaggacgaacgctggcggcgtgcctaacacatgcaagtcgagcgatgaagttccctcgggaatggattagcggcggacgggtgagtaacacgtgggcaacctgcctcaaagtgggggatagccctccgaaagggggattaataccgcataatgttaagtttttgcataaaagcttaaccaaaggagtaatccgctttgagatgggccc

SEQ ID NO: 4398 - DNA, 225 bp, Unknown
  bacterial strain Ascusb_6078A encodes 16S rRNA
agagtttgatcatggctcaggacgaacgctggcggcgtgcctaatacatgcaagtcgagcggagttgatcgggagcttgctcctgattaacttagcggcggacgggtgagtaacacgtaggcaacctgcccgtaagaccgggataactaccggaaacggtagctaataccggataatcaagcctctcgcatgagaggcttgggaaaggcggagcaatctgtcact

SEQ ID NO: 4399 - DNA, 225 bp, Unknown
  bacterial strain Ascusb_3175B encodes 16S rRNA
agagtttgatcatggctcaggatgaacgctggcggcgtgcctaacacatgcaagtcgaacgagcgagagatgaaacctagtgattttcgagcgagtggcggacgggtgagtaacgcgtgggtaacctgccttacagagggggataacagtttgaaaagactgctaataccgcataagcacacagtaccgcatggtacagggtgaaaagatttatcactgtaagat

SEQ ID NO: 4400 - DNA, 225 bp, Unknown; identical to SEQ ID NO: 4399
  bacterial strain Ascusb_992B encodes 16S rRNA

SEQ ID NO: 4401 - DNA, 225 bp, Unknown; identical to SEQ ID NO: 4399
  bacterial strain Ascusb_12024B encodes 16S rRNA

SEQ ID NO: 4402 - DNA, 225 bp, Unknown; identical to SEQ ID NO: 4399
  bacterial strain Ascusb_5433B encodes 16S rRNA

SEQ ID NO: 4403 - DNA, 225 bp, Unknown
  bacterial strain Ascusb_238A encodes 16S rRNA
agagtttgatcctggctcaggacgaacgctggcggcgtgcttaacacatgcaagtcgagcgatgaagcttccttcgggaagtggattagcggcggacgggtgagtaacacgtgggaaacctgcctcaaagaggggaatagccctccgaaaggaggattaataccgcataaagttagagtttcgcatgaaactttaaccaaaggagtaatccgctttgagatgggc

SEQ ID NO: 4404 - DNA, 225 bp, Unknown
  bacterial strain Ascusb_1657A encodes 16S rRNA
agagtttgatcatggctcaggacgaacgctggcggcgtgcctaatacatgcaagtcgagcggacctgatggagtgcttgcactcctgacggttagcggcggacgggtgagtaacacgtaggcaacctgcccgtaagaccgggataactaccggaaacggtagctaataccggataatcaagcctctcgcatgaggggcttgggaaaggcggttctgaatttattc

SEQ ID NO: 4405 - DNA, 225 bp, Unknown
  bacterial strain Ascusb_3123B encodes 16S rRNA
agagtttgatcatggctcaggatgaacgctagctacaggcttaacacatgcaagtcgaggggaaacgacatagagtgcttgcactttatgggcgtcgaccggcgaatgggtgagtaacgcgtatccaacctgcccttgaccgagggatagcccagtgaaaactgaattaatacctcatgttctcctcagacggcatcagacgaggagcaaagattaatcggtcaa

SEQ ID NO: 4406 - DNA, 225 bp, Unknown
  bacterial strain Ascusb_2743A encodes 16S rRNA
agagtttgatcctggctcaggatgaacgctggcggcgtgcctaatacatgcaagtcgagcgagaaattctttaatgaatcttcggaggatttagagaatgggcagcggcggacgggtgagtaacgcgtaggcaacctgcctcacacagagggatagccattggaaacgatgaataatacctcatgaaaccggaacaacacatgttgatccggtcaaagatttatc

SEQ ID NO: 4407 - DNA, 225 bp, Unknown
  bacterial strain Ascusb_6203A encodes 16S rRNA
agagtttgatcctggctcaggacgaacgctggcggcgtgcctaatacatgcaagtcgagcggagttaatcgggagcttgctcctgattaacttagcggcggacgggtgagtaacacgtaggcaacctgcccgtaagaccgggataactagcggaaacgttagctaataccggataatcaagtttctcgcatgggggacttgggaaaggcggagcaatctgtcact

SEQ ID NO: 4408 - DNA, 225 bp, Unknown; identical to SEQ ID NO: 4263
  bacterial strain Ascusb_12676A encodes 16S rRNA

SEQ ID NO: 4409 - DNA, 225 bp, Unknown; identical to SEQ ID NO: 4263
  bacterial strain Ascusb_7893A encodes 16S rRNA

SEQ ID NO: 4410 - DNA, 225 bp, Unknown; identical to SEQ ID NO: 4263
  bacterial strain Ascusb_1155A encodes 16S rRNA

SEQ ID NO: 4411 - DNA, 225 bp, Unknown; identical to SEQ ID NO: 4362
  bacterial strain Ascusb_20688A encodes 16S rRNA

SEQ ID NO: 4412 - DNA, 225 bp, Unknown; identical to SEQ ID NO: 4362
  bacterial strain Ascusb_1720A encodes 16S rRNA

SEQ ID NO: 4413 - DNA, 225 bp, Unknown; identical to SEQ ID NO: 4362
  bacterial strain Ascusb_265A encodes 16S rRNA

SEQ ID NO: 4414 - DNA, 225 bp, Unknown
  bacterial strain Ascusb_2594C encodes 16S rRNA
agagtttgatcctggctcaggatgaacgctggcggcgtgcctaacacatgcaagtcgaacgagcgagagatgaaacctagtgattctcgagcgagtggcggacgggtgagtaacgcgtgggtaacctgccttacagagggggataacagtttgaaaagactgctaataccgcataagcacacagtaccgcatggtacagggtgaaaagatttatcactgtaagat

SEQ ID NO: 4415 - DNA, 225 bp, Unknown
  bacterial strain Ascusb_5320A encodes 16S rRNA
agagtttgatcatggctcaggacgaacgctggcggcgtgcctaatacatgcaagtcgtgcggactttttaaaagcttgcttctaaaaagttagcggcggacgggtgagtaacacgtgggcaacctgcctgtaagatcgggataacgccgggaaaccggggctaataccggatagttttttcctccgcatggaggaaaaaggaaagacggcttttgctgtcactta

SEQ ID NO: 4416 - DNA, 225 bp, Unknown
  bacterial strain Ascusb_1147B encodes 16S rRNA
agagtttgatcctggctcaggatgaacgctggcggcgtgcctaatacatgcaagtcgagcgaatggattaagagcttgctcttatgaagttagcggcggacgggtgagtaacacgtgggtaacctgcccataagactgggataactccgggaaaccggggctaataccggataacattttgaactgcatggttcgaaattgaaaggcggcttcggctgtcactta

SEQ ID NO: 4417 - DNA, 225 bp, Unknown
  bacterial strain Ascusb_4552B encodes 16S rRNA
agagtttgatcatggctcagattgaacgctggcggcaggcctaatacatgcaagtcggacggtaacataagaaaagcttgcttttcttgatgacgagtggcggacgggtgagtaagatttgggaaactacctgatagagggggacaacagttggaaacgactgctaataccgcatacagccttagggtgaaagaagcgattcgctatcagatgtgcccaaacggg

SEQ ID NO: 4418 - DNA, 225 bp, Unknown
  bacterial strain Ascusb_2272C encodes 16S rRNA
agagtttgatcctggctcaggacgaacgctggcggcgtgcttaacacatgcaagtcgaacgggaagaaaagaaagagcttgctctttcttggattctagtggcaaacgggtgagtaacacgtaaacaacctgccttcaggatggggacaacagacggaaacgactgctaataccgaataccttccaatttccgcatggagataggaagaaagggtggcctctact

SEQ ID NO: 4419 - DNA, 225 bp, Unknown; identical to SEQ ID NO: 4407
  bacterial strain Ascusb_9859B encodes 16S rRNA

SEQ ID NO: 4420 - DNA, 225 bp, Unknown; identical to SEQ ID NO: 4406
  bacterial strain Ascusb_4154A encodes 16S rRNA

SEQ ID NO: 4421 - DNA, 225 bp, Unknown
  bacterial strain Ascusb_3469A encodes 16S rRNA
agagtttgatcatggctcaggacgaacgctggcggcgtgcttaacacatgcaagtcgaacgaagagcgacggaagcttgcttctatcaatcttagtggcgaacgggtgagtaacgcgtaatcaacctgcccttcagagggggacaacagttggaaacgactgctaataccgcatacgatctgacctcggcatcgaggatggatgaaaggtggcctctacatgtaa

SEQ ID NO: 4422 - DNA, 225 bp, Unknown
  bacterial strain Ascusb_688C encodes 16S rRNA
agagtttgatcatggctcaggacgaacgctggcggcgtgcctaatacatgcaagtcgagcggacctgatggagtgcttgcactcctgatggttagcggcggacgggtgagtaacacgtaggcaacctgcccgtaagaccgggataactaccggaaacggtagctaataccggataatcaagtcttccgcatgggaggcttgggaaaggcggttctgaatttattc

SEQ ID NO: 4423 - DNA, 225 bp, Unknown; identical to SEQ ID NO: 4368
  bacterial strain Ascusb_19458A encodes 16S rRNA

SEQ ID NO: 4424 - DNA, 225 bp, Unknown
  bacterial strain Ascusb_2680A encodes 16S rRNA
agagtttgatcctggctcaggacgaacgctggcggcgtgcctaatacatgcaagtcgtgcggaccttttaaaagcttgcttttaaaaggttagcggcggacgggtgagtaacacgtgggcaacctgcctgtaagactgggataacgccgggaaaccggggctaataccagatagttttttcctccgcatggaggaaaaaggaaaggcggcttcggctgccactta

SEQ ID NO: 4425 - DNA, 225 bp, Unknown; identical to SEQ ID NO: 4261
  bacterial strain Ascusb_3590B encodes 16S rRNA

SEQ ID NO: 4426 - DNA, 225 bp, Unknown
  bacterial strain Ascusb_21D encodes 16S rRNA
agagtttgatcctggctcagattgaacgctggcggcaggcctaacacatgcaagtcgaacggtaacaggaagaagcttgcttctttgctgacgagtggcggacgggtgagtaatgtctgggaaactgcctgatggagggggataactactggaaacggtagctaataccgcataatgtcgcaagaccaaagtgggggaccttcgggcctcatgccatcagatgtg

SEQ ID NO: 4427 - DNA, 225 bp, Unknown; identical to SEQ ID NO: 4426
  bacterial strain Ascusb_17947D encodes 16S rRNA

SEQ ID NO: 4428 - DNA, 225 bp, Unknown
  bacterial strain Ascusb_987B encodes 16S rRNA
agagtttgatcatggctcagattgaacgctggcggcaggcctaatacatgcaagtcgaacggtaacataagaaaagcttgcttttcttgatgacgagtggcggacgggtgagtaatatttgggaagctacctgatagagggggacaacagttggaaacgactgctaataccgcatacagccttagggtgaaagaagaaattcgctatcagatgtgcccaaacggg

SEQ ID NO: 4429 - DNA, 225 bp, Unknown
  bacterial strain Ascusb_10845B encodes 16S rRNA
agagtttgatcatggctcaggacgaacgctggcggcgtgcctaatacatgcaagtcgtgcggaccttttaaaagcttgcttttaaaaggttagcggcggacgggtgagtaacacgtgggcaacctgcctgtaagatcgggataacgccgggaaaccggggctaataccggatagttttttcctccgcatggaggagaaaggaaagacggcttcggctgtcactta

SEQ ID NO: 4430 - DNA, 225 bp, Unknown; identical to SEQ ID NO: 4406
  bacterial strain Ascusb_3680A encodes 16S rRNA

SEQ ID NO: 4431 - DNA, 225 bp, Unknown; identical to SEQ ID NO: 4406
  bacterial strain Ascusb_1626A encodes 16S rRNA

SEQ ID NO: 4432 - DNA, 225 bp, Unknown
  bacterial strain Ascusb_14905A encodes 16S rRNA
agagtttgatcatggctcaggacgaacgctggcggcgtgcctaacacatgcaagtcgaacggagtgattcgaaagcttgcttttgaatcacttagtggcggacgggtgagtaacgcgtgagtaacctgcctttcagagggggataacatcctgaaaaggatgctaataccgcatgacatatcgaggccgcatggtcttggtatcaaaggagcaatccgctgagag

SEQ ID NO: 4433 - DNA, 225 bp, Unknown
  bacterial strain Ascusb_464A encodes 16S rRNA
agagtttgatcatggctcaggacgaacgctggcggcgtgcctaacacatgcaagtcgagcgaggtgatttccttcgggaatgaacctagcggcggacgggtgagtaacacgtgggcaacctgccttatagaggggaatagcctcccgaaagggagattaataccgcataatattgaagcttcgcatgaagcttcaatcaaaggagcaatccgctataagatgggc

SEQ ID NO: 4434 - DNA, 225 bp, Unknown
  bacterial strain Ascusb_197B encodes 16S rRNA
agagtttgatcatggctcagattgaacgctggcggcaggcctaacacatgcaagtcgagcggtaacaggggaagcttgcttctcgctgacgagcggcggacgggtgagtaatgtatggggatctgcccgatagagggggataactactggaaacggtggctaataccgcataatctcttaggagcaaagcaggggaccttcgggccttgcgctgtcggatgaacc

SEQ ID NO: 4435 - DNA, 225 bp, Unknown; identical to SEQ ID NO: 4121
  bacterial strain Ascusb_1665B encodes 16S rRNA

SEQ ID NO: 4436 - DNA, 225 bp, Unknown; identical to SEQ ID NO: 4049
  bacterial strain Ascusb_2516B encodes 16S rRNA

SEQ ID NO: 4437 - DNA, 225 bp, Unknown
  bacterial strain Ascusb_5764A encodes 16S rRNA
agagtttgatcatggctcaggatgaacgctggcggcgtgcttaacacatgcaagtcgaacggggttaataagtggaagtcttcggatggaagcttgttaacctagtggcggacgggtgagtaacgcgtgggtaacctgccttatacagggggataacagccggaaacggttgctaataccgcataagcatacagtgccgcatggtacagtgtgaaaaagattaag

SEQ ID NO: 4438 - DNA, 225 bp, Unknown
  bacterial strain Ascusb_3082A encodes 16S rRNA
agagtttgatcctggctcaggacgaacgctggcggcgtgcctaatacatgcaagtcgagcggacctgatggagtgcttgcactcctgatggttagcggcggacgggtgagtaacacgtaggcaacctgcccgtaagaccgggataactaccggaaacggtagctaataccggataatcaagtctctcgcatgggaggcttgggaaaggcggagcaatctgtcact

SEQ ID NO: 4439 - DNA, 225 bp, Unknown
  bacterial strain Ascusb_108B encodes 16S rRNA
agagtttgatcatggctcaggacgaacgctggcggcgtgcctaacacatgcaagtcgagcgagaagaactccttcgggagggattctagcggcggacgggtgagtaacacgtgggcaacctgccttagtgagggggatagcctcccgaaagggagattaataccgcataacattattctaccgcatgatagaataatcaaaggagtaatccgcactaagatgggc

SEQ ID NO: 4440 - DNA, 225 bp, Unknown
  bacterial strain Ascusb_2792C encodes 16S rRNA
agagtttgatcatggctcaggacgaacgctggcggcgtgcctaatacatgcaagtcgagcggagttaatcgggagcttgctcctgattaacttagcggcggacgggtgagtaacacgtgggtaacctgcctcatagaggggaatagcctcccgaaagggagattaataccgcataatgtatgagaatcgcatgatttttgtaccaaaggagcaatccgctatgag

SEQ ID NO: 4441 - DNA, 225 bp, Unknown
  bacterial strain Ascusb_3321A encodes 16S rRNA
agagtttgatcatggctcaggacgaacgctggcggcgtgcctaatacatgcaagtcgagcggagttaatcgggagcttgctcctgattaacttagcggcggacgggtgagtaacacgtgggtaacctgcctcaaagtgggggatagccttccgaaaggaagattaataccgcataacataagagaatcgcatgattttcttatcaaagatttattgctttgagat

SEQ ID NO: 4442 - DNA, 225 bp, Unknown
  bacterial strain Ascusb_1161B encodes 16S rRNA
agagtttgatcctggctcaggacgaacgctggcggcgtgcttaacacatgcaagtcgaacggagaactttcttcggaatgttcttagtggcgaacgggtgagtaacgcgtaggcaacctgccctctggttggggacaacattccgaaagggatgctaataccgaatgagatcctctttccgcatggagagaggatgaaagatggcctctacttgtaagctatcgc

SEQ ID NO: 4443 - DNA, 225 bp, Unknown
  bacterial strain Ascusb_738A encodes 16S rRNA
agagtttgatcctggctcaggatgaacgctagctacaggcttaacacatgcaagtcgaggggcagcatgaagtttgcttgcaaactttgatggcgaccggcgcacgggtgagtaacgcgtatccaaccttccctatactagaggatagcccggcgaaagtcggattaatactctatgttcttcgtagaagacatctgaaatgaagcaaaggtttaccggtatagg

SEQ ID NO: 4444 - DNA, 225 bp, Unknown
  bacterial strain Ascusb_15659B encodes 16S rRNA
agagtttgatcctggctcaggatgaacgctagctacaggcttaacacatgcaagtcgaggggaaacgacagagagtgcttgcactttttgggcgtcgaccggcgaatgggtgagtaacgcgtatccaacctgcccttgactgagggatagcccagtgaaaactgaattaatacctcatatcctcctccgacggcatcagacgaggagtaaagatttatcggtcaa

SEQ ID NO: 4445 - DNA, 225 bp, Unknown
  bacterial strain Ascusb_379B encodes 16S rRNA
agagtttgatcatggctcaggatgaacgctggcggcgtgcctaatacatgcaagtcgagcgaatggattaagagcttgctcttatgaagttagcggcggacgggtgagtaacacgtgggtaacctgcccataagactgggataactccgggaaaccggggctaataccggatgacattttgaactgcatggttcgaaattgaaaggcggcttcggctgtcactta

SEQ ID NO: 4446 - DNA, 225 bp, Unknown
  bacterial strain Ascusb_3326B encodes 16S rRNA
agagtttgatcatggctcaggacgaacgctggcggcgtgcctaacacatgcaagtcgagcgatgaagttccttcgggaatggattagcggcggacgggtgagtaacacgtgggcaacctgcctcaaagtgggggatagcctcccgaaagggagattaataccgcataacattatctctttgcatgaagagataatcaaaggagcaatccgctttgagatgggccc

SEQ ID NO: 4447 - DNA, 217 bp, Unknown
  bacterial strain Ascusb_740A encodes 16S rRNA
agagtttgatcctggctcaggacgaacgctggcggcgtgcctaatacatgcaagtcgagcggacctgatggagtgcttgcactcctgatggttagcggcggacgggtgagtaacacgtaggtaacctgcctgtaagactgggataactagcggaaacgttagctaataccggataatttattttctcgcatgggaagataatgaaagacggagcaat

SEQ ID NO: 4448 - DNA, 225 bp, Unknown; identical to SEQ ID NO: 4362
  bacterial strain Ascusb_2413B encodes 16S rRNA

SEQ ID NO: 4449 - DNA, 217 bp, Unknown; identical to SEQ ID NO: 4447
  bacterial strain Ascusb_15001A encodes 16S rRNA

SEQ ID NO: 4450 - DNA, 217 bp, Unknown; identical to SEQ ID NO: 4447
  bacterial strain Ascusb_13183A encodes 16S rRNA

SEQ ID NO: 4451 - DNA, 225 bp, Unknown
  bacterial strain Ascusb_429A encodes 16S rRNA
agagtttgatcctggctcaggatgaacgctggcggcgtgcttaacacatgcaagtcgaacggagtttataagcagagcccttcggggtaaagcttataaacttagtggcggacgggtgagtaacgcgtgggtaacctgccttacacagggggataacaactggaaacggttgctaataccgcataagcgcacggtatcgcatgatacagtgtgaaaagatttatc

SEQ ID NO: 4452 - DNA, 225 bp, Unknown
  bacterial strain Ascusb_19080B encodes 16S rRNA
agagtttgatcatggctcaggatgaacgctagctacaggcttaacacatgcaagtcgaggggaaacgacagagagtgcttgcactttttgggcgtcgaccggcgaatgggtgagtaacgcgtatccaacctgcccttgactgagggatagcccagtgaaaactgaattaatacctcatgttctcctcagacggcatcagacgaggagcaaagattaatcggtcaa

SEQ ID NO: 4453 - DNA, 225 bp, Unknown
  bacterial strain Ascusb_888B encodes 16S rRNA
agagtttgatcatggctcaggatgaacgctggcggcgtgcctaacacatgcaagtcgaacggagtttatttatttgagaccttcgggtggattatttataaacttagtggcggacgggtgagtaacgcgtgggcaacctgcctcatactgggggataacagttggaaacgactgttaataccgcataagcgcacggtgtcgcatgacacagtgtgaaaaactccg

SEQ ID NO: 4454 - DNA, 225 bp, Unknown; identical to SEQ ID NO: 2056
  bacterial strain Ascusb_15117C encodes 16S rRNA

SEQ ID NO: 4455 - DNA, 225 bp, Unknown; identical to SEQ ID NO: 2056
  bacterial strain Ascusb_10375B encodes 16S rRNA

SEQ ID NO: 4456 - DNA, 225 bp, Unknown; identical to SEQ ID NO: 2056
  bacterial strain Ascusb_10976C encodes 16S rRNA

SEQ ID NO: 4457 - DNA, 225 bp, Unknown; identical to SEQ ID NO: 2056
  bacterial strain Ascusb_15111C encodes 16S rRNA

SEQ ID NO: 4458 - DNA, 225 bp, Unknown
  bacterial strain Ascusb_318C encodes 16S rRNA
agagtttgatcatggctcagattgaacgctggcggcaggcctaatacatgcaagtcgaacggtaacataagaaaagcttgcttttcttgatgacgagtggcggacgggtgagtaagatttgggaaactacctgatagagggggacaacagttggaaacgactgctaataccgcatacagccttagggtgaaagaagaaattcgctatcagatgtgcccaaacggg

SEQ ID NO: 4459 - DNA, 225 bp, Unknown
  bacterial strain Ascusb_18705B encodes 16S rRNA
agagtttgatcatggctcagattgaacgctggcggcaggcctaacacatgcaagtcgagcggtagcacagagagcttgctctcgggtgacgagcggcggacgggtgagtaatgtctgggaaactgcctgatggagggggataactactggaaacggtagctaataccgcataatgtcgcaagaccaaagtgggggaccttagggcctcatgccatcagatgtgcc

SEQ ID NO: 4460 - DNA, 225 bp, Unknown; identical to SEQ ID NO: 4049
  bacterial strain Ascusb_1588B encodes 16S rRNA

SEQ ID NO: 4461 - DNA, 225 bp, Unknown; identical to SEQ ID NO: 4362
  bacterial strain Ascusb_9933B encodes 16S rRNA

SEQ ID NO: 4462 - DNA, 225 bp, Unknown; identical to SEQ ID NO: 4434
  bacterial strain Ascusb_4663B encodes 16S rRNA

SEQ ID NO: 4463 - DNA, 225 bp, Unknown
  bacterial strain Ascusb_338C encodes 16S rRNA
agagtttgatcatggctcaggatgaacgctggcggcgtgcctaatacatgcaagtcgagcgagaaattctttaatgaatcttcggaggaattagaggatggacagcggcggacgggtgagtaacgcgtaggcaacctgcctcacacagagggatagccattggaaacgatgaataatacctcatgaaaccggaataacacatgttgatccggtcaaagatttatc

SEQ ID NO: 4464 - DNA, 225 bp, Unknown; identical to SEQ ID NO: 4434
  bacterial strain Ascusb_6110B encodes 16S rRNA

SEQ ID NO: 4465 - DNA, 225 bp, Unknown
  bacterial strain Ascusb_3141A encodes 16S rRNA
agagtttgatcatggctcaggacgaacgctggcggcgtgcctaatacatgcaagtggaacgcatgattgataccgtagcttgctacaccattaatcatgagtcgcgaacgggtgagtaacgcgtaggtaacctaccttctagcgggggataactattggaaacgatagctaataccgcataacagtttttaacacatgttagaaatttaaaaggagcaattgctt

SEQ ID NO: 4466 - DNA, 225 bp, Unknown; identical to SEQ ID NO: 4119
  bacterial strain Ascusb_2027C encodes 16S rRNA

SEQ ID NO: 4467 - DNA, 225 bp, Unknown; identical to SEQ ID NO: 4119
  bacterial strain Ascusb_724C encodes 16S rRNA

SEQ ID NO: 4468 - DNA, 225 bp, Unknown
  bacterial strain Ascusb_2786C encodes 16S rRNA
agagtttgatcatggctcaggacgaacgctggcggcgtgcctaatacatgcaagtcgagcggagttaattaggagcttgctcttgattaacttagcggcggacgggtgagtaacacgtgggtaacctgcctcaaagtgggggatagccttccgaaaggaagattaataccgcataatatgagagaatcgcatgattttcttatcaaagatttattgctttgagat

SEQ ID NO: 4469 - DNA, 225 bp, Unknown
  bacterial strain Ascusb_514C encodes 16S rRNA
agagtttgatcctggctcagattgaacgctggcggcaggcctaatacatgcaagtcgaacggtaacataggaaaagcttgcttttcctgatgacgagtggcggacgggtgagtaagatttgggaagctacctgatagagggggacaacagttggaaacgactgctaataccgcatacagcctgagggtgaaagcagcaatgcgctatcagatgtgcccaaatggg

SEQ ID NO: 4470 - DNA, 225 bp, Unknown; identical to SEQ ID NO: 4469
  bacterial strain Ascusb_4119D encodes 16S rRNA

SEQ ID NO: 4471 - DNA, 225 bp, Unknown
  bacterial strain Ascusb_3973A encodes 16S rRNA
agagtttgatcatggctcaggacgaacgctggcggcgtgcctaatacatgcaagtcgagcggagtttatcgggagcttgctcctgatgaacttagcggcggacgggtgagtaacacgtaggcaacctgcccgtaagactgggataactaccggaaacggtagctaataccggatacgcaagtctctcgcatgagggacttgggaaaggcggagcaatctgtcact

SEQ ID NO: 4472 - DNA, 225 bp, Unknown
  bacterial strain Ascusb_2442B encodes 16S rRNA
agagtttgatcctggctcaggacgaacgctggcggcgtgcctaatacatgcaagtcgagcggagttaatcgggagcttgctcctgattagcttagcggcggacgggtgagtaacacgtaggcaacctgcctgtaagactgggataactaccggaaacggtagctaataccggatacgcaagtctatcgcatggtggacttgggaaagacggagcaatctgtcact

SEQ ID NO: 4473 - DNA, 225 bp, Unknown; identical to SEQ ID NO: 4384
  bacterial strain Ascusb_431B encodes 16S rRNA

SEQ ID NO: 4474 - DNA, 225 bp, Unknown; identical to SEQ ID NO: 4463
  bacterial strain Ascusb_847C encodes 16S rRNA

SEQ ID NO: 4475 - DNA, 225 bp, Unknown; identical to SEQ ID NO: 4121
  bacterial strain Ascusb_896B encodes 16S rRNA

SEQ ID NO: 4476 - DNA, 225 bp, Unknown; identical to SEQ ID NO: 4362
  bacterial strain Ascusb_3868B encodes 16S rRNA

SEQ ID NO: 4477 - DNA, 225 bp, Unknown
  bacterial strain Ascusb_917B encodes 16S rRNA
agagtttgatcatggctcaggatgaacgctggcggcgtgcctaacacatgcaagtcgaacgagcgagagatgaaacctagtgattctcgagcgagtggcggacgggtgagtaacgcgtgggtaacctgccttacagagggggataacagtttgaaaagactgctaataccgcataagcacacagtaccgcatggtacagggtgaaaagatctatcgctgtaagat

SEQ ID NO: 4478 - DNA, 225 bp, Unknown
  bacterial strain Ascusb_1379B encodes 16S rRNA
agagtttgatcctggctcaggacgaacgctggcggcgtgcctaatacatgcaagtcgagcggactttaaaagcttgcttttaaagttagcggcggacgggtgagtaacacgtgggtaacctgcctcaaagtgggggatagccttccgaaaggaagattaataccgcataatatgagagaatcgcatgattttcttatcaaagatttattgctttgagatggaccc

SEQ ID NO: 4479 - DNA, 217 bp, Unknown
  bacterial strain Ascusb_1305B encodes 16S rRNA
agagtttgatcatggctcaggacgaacgctggcggcgtgcctaatacatgcaagtcgagcggacttgatggagagcttgctctccagagagttagcggcggacgggtgagtaacacgtaggtaacctgcctgtaagactgggataactagcggaaacgttagctaataccggataatttattttctcgcatgggaagataatgaaagacggagcaat

SEQ ID NO: 4480 - DNA, 217 bp, Unknown; identical to SEQ ID NO: 4479
  bacterial strain Ascusb_589B encodes 16S rRNA

SEQ ID NO: 4481 - DNA, 217 bp, Unknown; identical to SEQ ID NO: 4479
  bacterial strain Ascusb_9116A encodes 16S rRNA

SEQ ID NO: 4482 - DNA, 225 bp, Unknown; identical to SEQ ID NO: 2308
  bacterial strain Ascusb_799B encodes 16S rRNA

SEQ ID NO: 4483 - DNA, 225 bp, Unknown; identical to SEQ ID NO: 2308
  bacterial strain Ascusb_678B encodes 16S rRNA

SEQ ID NO: 4484 - DNA, 225 bp, Unknown; identical to SEQ ID NO: 2308
  bacterial strain Ascusb_560B encodes 16S rRNA

SEQ ID NO: 4485 - DNA, 225 bp, Unknown
  bacterial strain Ascusb_3969B encodes 16S rRNA
agagtttgatcatggctcaggacgaacgctggcggcgtgcttaacacatgcaagtcgaacgagaagagatgagaagcttgcttcttattgattcgagtggcaaacgggtgagtaacgcgtaagcaacctgcccttcagatggggacaacagctggaaacggctgctaataccgaatacgttctttctgccgcatgacagagagaagaaagggaggctcttcggag

SEQ ID NO: 4486 - DNA, 225 bp, Unknown
  bacterial strain Ascusb_2148A encodes 16S rRNA
agagtttgatcatggctcaggacgaacgctggcggcgtgcttaacacatgcaagtcgaacggggcaattgaaagcttgcttttgagagcctagtggcaaacgggtgagtaacgcgtaggaaacctgcctccgggatggggacaaccgtccgaaaggacagctaataccgaatgaagtacggctgacacatgtcagcggtatgaaagatggcctctatatataagc

SEQ ID NO: 4487 - DNA, 225 bp, Unknown
  bacterial strain Ascusb_2590D encodes 16S rRNA
agagtttgatcatggctcaggacgaacgctggcggcgtgcctaatacatgcaagtcgtgcggaccttttaaaagcttgcttttaaaaggttagcggcggacgggtgagtaacacgtgggtaacctgcctcaaagtgggggatagccttccgaaaggaagattaataccgcataatatgagagaatcgcatgattttcttatcaaagatttattgctttgagatgg

SEQ ID NO: 4488 - DNA, 225 bp, Unknown
  bacterial strain Ascusb_21571A encodes 16S rRNA
agagtttgatcctggctcaggatgaacgctagctacaggcttaacacatgcaagtcgaggggaaacgatattgaaagcttgctttctttaggcgtcgaccggcgaatgggtgagtaacgcgtatccaacctgcccctgagtaagggatagcccatcgaaagatggattaataccttatggtctcctttgcagacatctaattaggagtaaagatttatcgctgag

SEQ ID NO: 4489 - DNA, 225 bp, Unknown
  bacterial strain Ascusb_1532B encodes 16S rRNA
agagtttgatcctggctcaggatgaacgctggcggcgtgcctaacacatgcaagtcgagcgggaagctcacaaatgattcttcggatgaatgcgtgagtggacagcggcggacgggtgagtaacgcgtgggcaacctgccccttactgaaggatagccgagggaaacttcgagtaatacttcataatgcattttcttcacatgaagggaatgccaaagatttatc

SEQ ID NO: 4490 - DNA, 225 bp, Unknown
  bacterial strain Ascusb_1268A encodes 16S rRNA
agagtttgatcctggctcaggatgaacgctagctacaggcttaacacatgcaagtcgaggggcagcatgagagtagcttgctactcttgatggcgaccggcgcacgggtgcgtaacgcgtatccaacctgccgtgtactccgggatagccctctgaaaggaggattaataccggatgtggtcgggtgaagacatctttactcgattaaagatttatcggtacacc

SEQ ID NO: 4491 - DNA, 225 bp, Unknown
  bacterial strain Ascusb_9421B encodes 16S rRNA
agagtttgatcctggctcaggatgaacgctagctacaggcttaacacatgcaagtcgaggggtaacgacagcgaaagcttgcttttgctgggcgacgaccggcgcacgggtgagtaacgcgtatccaacctgcccataactaagggataatccgtagaaatgcggtctaataccttatgtgttccgaagaagacatctgaattggaataaagatttatcggttat

SEQ ID NO: 4492 - DNA, 225 bp, Unknown
  bacterial strain Ascusb_8024A encodes 16S rRNA
agagtttgatcatggctcaggatgaacgctagctacaggcttaacacatgcaagtcgaggggcagcataacgaaagcttgcttttgttgatggcgaccggcgcacgggtgagtaacgcgtatccaaccttccctatagtagagaatagcccggcgaaagtcggattaatgctctatgttgtatttagaggacatctgaagaataccaaaggtttaccgctatagg

SEQ ID NO: 4493 - DNA, 225 bp, Unknown; identical to SEQ ID NO: 4492
  bacterial strain Ascusb_3879A encodes 16S rRNA

SEQ ID NO: 4494 - DNA, 225 bp, Unknown; identical to SEQ ID NO: 4405
  bacterial strain Ascusb_9365A encodes 16S rRNA

SEQ ID NO: 4495 - DNA, 225 bp, Unknown
  bacterial strain Ascusb_21B encodes 16S rRNA
agagtttgatcatggctcaggacgaacgctggcggcgtgcttaacacatgcaagtcgagcgatgaaatcccttcggggatggattagcggcggacgggtgagtaacacgtgggcaacctgcctcaaagtgggggatagccttccgaaagggagattaataccgcataacattagtttttcacatgaagtactaattaaaggagtaatccgctttgagatgggccc

SEQ ID NO: 4496 - DNA, 225 bp, Unknown
  bacterial strain Ascusb_19172A encodes 16S rRNA
agagtttgatcatggctcagattgaacgctggcggcaggcctaatacatgcaagtcgaacggtaacagagagatagcttgctatctctgctgacgagtggcggacgggtgagtaaagtctgggaaactgcctgatagagggggacaacagctggaaacggctgctaataccgcatacgccctgagggggaaagcagcaatgcgctatcagatgtgcccagatggg

SEQ ID NO: 4497 - DNA, 225 bp, Unknown; identical to SEQ ID NO: 2047
  bacterial strain Ascusb_2294A encodes 16S rRNA

SEQ ID NO: 4498 - DNA, 225 bp, Unknown
  bacterial strain Ascusb_4670A encodes 16S rRNA
agagtttgatcatggctcaggacgaacgctggcggcgtgcctaatacatgcaagtcgaacgcttttctttccaccggagcttgctccaccggaaagaaaagagtggcgaacgggtgagtaacacgtgggtaacctgccctcaagcgggggataacacttggaaacaggtgctaataccgcataacaatagaaggagcatttcttctgtttgaaagtcgcaactgc

SEQ ID NO: 4499 - DNA, 225 bp, Unknown
  bacterial strain Ascusb_18705A encodes 16S rRNA
agagtttgatcctggctcaggatgaacgctagctacaggcttaacacatgcaagtcgaggggaaacgacagagagtgcttgcactttttgggcgtcgaccggcgaatgggtgagtaacgcgtatccaacctgcctttgactgagggatagcccagtgaaaactgaattaatacctcatgttctcctcagacggcatcagacgaggagcaaagattaatcggtcaa

SEQ ID NO: 4500 - DNA, 225 bp, Unknown
  bacterial strain Ascusb_221A encodes 16S rRNA
agagtttgatcctggctcaggacgaacgctggcggcgtgcctaatacatgcaagtcgaacgaaactttcttacaccgaatgcttgcattcatcgtaagaagttgagtggcggacgggtgagtaacacgtgggtaacctgcctaaaagaaggggataacacttggaaacaggtgctaataccgtatatctctaaggatcgcatgatccttagatgaaagatggttc

SEQ ID NO: 4501 - DNA, 225 bp, Unknown; identical to SEQ ID NO: 381
  bacterial strain Ascusb_1630A encodes 16S rRNA

SEQ ID NO: 4502 - DNA, 225 bp, Unknown
  bacterial strain Ascusb_83A encodes 16S rRNA
agagtttgatcctggctcaggacgaacgctggcggcgtgcctaacacatgcaagtcgagcggagatgatctgaagtttactttgggttgtcttagcggcggacgggtgagtaacgcgtgggcaacctgcctttcacagggggataacacagggaaacttgtgctaataccgcataacacagcgaggtagcattaccttgttgtcaaaggagcaatccggtgatag

SEQ ID NO: 4503 - DNA, 225 bp, Unknown; identical to SEQ ID NO: 4502
  bacterial strain Ascusb_2633A encodes 16S rRNA

SEQ ID NO: 4504 - DNA, 225 bp, Unknown; identical to SEQ ID NO: 4502
  bacterial strain Ascusb_8244A encodes 16S rRNA

SEQ ID NO: 4505 - DNA, 225 bp, Unknown; identical to SEQ ID NO: 4243
  bacterial strain Ascusb_624A encodes 16S rRNA

SEQ ID NO: 4506 - DNA, 225 bp, Unknown
  bacterial strain Ascusb_5149A encodes 16S rRNA
agagtttgatcatggctcaggatgaacgctagctacaggcttaacacatgcaagtcgaggggcagcgagaagaaagcttgctttctttgtcggcgaccggcgcacgggtgagtaacgcgtatccaaccttccccatagtagggaatagcccggcgaaagtcggattaatgccctatgttgtattatgaggacatctgattaataccaaagattcatcgctatggg

SEQ ID NO: 4507 - DNA, 225 bp, Unknown
  bacterial strain Ascusb_344B encodes 16S rRNA
agagtttgatcatggctcaggatgaacgctagctacaggcttaacacatgcaagtcgaggggaaacgacatagagtgcttgcactttttgggcgtcgaccggcgaatgggtgagtaacgcgtatccaacctgcccttgactgagggatagcccagtgaaaactgaattaatacctcatgttctcctcagacggcatcagacgaggagtaaagattaatcggtcaa

SEQ ID NO: 4508 - DNA, 225 bp, Unknown
  bacterial strain Ascusb_2535A encodes 16S rRNA
agagtttgatcctggctcaggatgaacgctagctacaggcttaacacatgcaagtcgaggggaaacgatgagagagcttgctctctcaggcgtcgaccggcgcacgggtgagtaacacgtatccaacctgcctttttccagggaataaccttgcgaaagtaagactaatgccctatgtgtcctttgacggcatcagacgaggacgaaagatttatcggaaaggga

SEQ ID NO: 4509 - DNA, 225 bp, Unknown
  bacterial strain Ascusb_877A encodes 16S rRNA
agagtttgatcatggctcaggatgaacgctagctacaggcttaacacatgcaagtcgaggggaaacgatattgaaagcttgctttctttaggcgtcgaccggcgaatgggtgagtaacgcgtatccaacctgcccctgagtaagggatagcccatcgaaagatggattaataccttatggtttcctttgaaggcatctgattaggaataaagatttatcgctgag

SEQ ID NO: 4510 - DNA, 225 bp, Unknown; identical to SEQ ID NO: 4275
  bacterial strain Ascusb_325B encodes 16S rRNA

SEQ ID NO: 4511 - DNA, 225 bp, Unknown
  bacterial strain Ascusb_3758B encodes 16S rRNA
agagtttgatcatggctcaggacgaacgctggcggcgtgcttaacacatgcaagtcgagcgatgaagcttcttcgggagtggattagcggcggacgggtgagtaacacgtgggtaacctgcctcatagaggggaatagcctttcgaaaggaagattaataccgcatatggtagctttatcgcatggtaatgctattaaaggagtaatccgctatgagatggaccc

SEQ ID NO: 4512 - DNA, 225 bp, Unknown
  bacterial strain Ascusb_2378A encodes 16S rRNA
agagtttgatcatggctcaggataaacgccggcggcgtgcctaatacatgcaagtcgaacgagtgcagcaatgcacgagtggcgtacgggtgagtaacacgttggtaacctgccccacagaccgggataccctagtgaaaactgggctaataccggatgacatcctctgagcgcaagctctaaggatcaaaggcggcttcggccgcgctgcgggatggacctgcg

SEQ ID NO: 4513 - DNA, 225 bp, Unknown; identical to SEQ ID NO: 4512
  bacterial strain Ascusb_150A encodes 16S rRNA

SEQ ID NO: 4514 - DNA, 225 bp, Unknown
  bacterial strain Ascusb_1149A encodes 16S rRNA
agagtttgatcctggctcaggacgaacgctggcggcgtgcttaacacatgcaagtcgaacgagaagagatgagaagcttgcttcttattgattcgagtggcaaacgggtgagtaacgcgtaagcaacctgcccttcagatggggacaacagctggaaacggctgctaataccgaatatgttctttttgtcgcatggcagagggaagaaagggaggctcttcggag

SEQ ID NO: 4515 - DNA, 225 bp, Unknown
  bacterial strain Ascusb_3011A encodes 16S rRNA
agagtttgatcatggctcaggacgaacgctggcggcgtgcttaacacatgcaagtcgaacgaggtgattgaaagcttgcttttgagaaccgagtggcaaacgggtgagtaacgcgtagacaacctgccgcaaagatggggacaacagtccgaaaggactgctaataccgaatgttgtcaagcttccgcatgggagtttgattaaagatggcctctacttgtaagc

SEQ ID NO: 4516 - DNA, 225 bp, Unknown
  bacterial strain Ascusb_198A encodes 16S rRNA
agagtttgatcatggctcaggatgaacgccggcggtgtgcctaatacatgcaagtcgaacgcgttggcccaactgattgattgtgcttgcacaggattgacgttggtttcccaacgagtggcggacgggtgagtaacacgtaggcaacctgccccgaagcgggggacaacatttggaaacaagtgctaataccgcataacaactttgaccgcctggtcaaagctt

SEQ ID NO: 4517 - DNA, 225 bp, Unknown
  bacterial strain Ascusb_2381A encodes 16S rRNA
agagtttgatcctggctcaggacgaacgctggcggtatgcttaacacatgcaagtcgaacgagacgcttttgatagacccttcgggggaaatcgggagcagacagtggcgaacgggtgagtaacgcgtgggcaacctacctatcggagcgggatagcctcgagaaatcgggagtaaaaccgcataacacaatagcgtcgcatgacggaattgtcaaaactccggt

SEQ ID NO: 4518 - DNA, 225 bp, Unknown; identical to SEQ ID NO: 3308
  bacterial strain Ascusb_7938A encodes 16S rRNA

SEQ ID NO: 4519 - DNA, 225 bp, Unknown
  bacterial strain Ascusb_1882A encodes 16S rRNA
agagtttgatcatggctcaggacgaacgctggcggcgtgcctaatacatgcaagtcgagcggagttaatcgggagcttgctcctgattaacttagcggcggacgggtgagtaacacgtaggcaacctgcccgtaagaccgggataactaccggaaacggtagctaataccggatacgcaagtctatcgcatggtggacttgggaaaggcggagcaatctgtcact

SEQ ID NO: 4520 - DNA, 225 bp, Unknown
  bacterial strain Ascusb_2191B encodes 16S rRNA
agagtttgatcctggctcagattgaacgctggcggcaggcctaacacatgcaagtcgagcggtagcacagagagcttgctctcgggtgacgagcggcggacgggtgagtaatgtctgggaaactgcctgatggagggggataactactggaaacggtagctaataccgcataacgtcgcaagaccaaagagggggaccttcgggcctcttgccatcagatgtgcc

SEQ ID NO: 4521 - DNA, 225 bp, Unknown
  bacterial strain Ascusb_620A encodes 16S rRNA
agagtttgatcctggctcaggacgaacgctggcggcgtgcctaacacatgcaagtcgaacggggattttgtttcggcagaatcctagtggcgaacgggtgagtaacgcgtaggcaacctgccctccagacggggacaacattccgaaaggggtgctaataccggatacgaaggagccatcgcatggtggttctttgaaagatggcctctatttataagctatcgc

SEQ ID NO: 4522 - DNA, 225 bp, Unknown; identical to SEQ ID NO: 4208
  bacterial strain Ascusb_3160A encodes 16S rRNA

SEQ ID NO: 4523 - DNA, 225 bp, Unknown; identical to SEQ ID NO: 4208
  bacterial strain Ascusb_1776A encodes 16S rRNA

SEQ ID NO: 4524 - DNA, 225 bp, Unknown; identical to SEQ ID NO: 4208
  bacterial strain Ascusb_2924A encodes 16S rRNA

SEQ ID NO: 4525 - DNA, 225 bp, Unknown; identical to SEQ ID NO: 4452
  bacterial strain Ascusb_804A encodes 16S rRNA

SEQ ID NO: 4526 - DNA, 225 bp, Unknown; identical to SEQ ID NO: 4452
  bacterial strain Ascusb_2188A encodes 16S rRNA

SEQ ID NO: 4527 - DNA, 225 bp, Unknown
  bacterial strain Ascusb_1244A encodes 16S rRNA
agagtttgatcatggctcaggacgaacgctggcggcgtgcttaacacatgcaagtcgaacggagagcgatggaagcttgcttctatcaatcttagtggcgaacgggtgagtaacgcgtaggtaacctgcctactagcgggggataactattggaaacgatagctaataccgcataacagcatttaacacatgttagatgcttgaaaggagcaattgcttcactag

SEQ ID NO: 4528 - DNA, 225 bp, Unknown
  bacterial strain Ascusb_799A encodes 16S rRNA
agagtttgatcctggctcaggatgaacgctagcgacaggcttaacacatgcaagtcgaggggcatcgggattgtagcaatacaattgccggcgaccggcgcacgggtgagtaacgcgtatgcaacctacctatcagaggagaataacccggcgaaagtcggactaatactccataaaacagggatcccgcctgggaatatttgttaaagattaatcgctgataga

SEQ ID NO: 4529 - DNA, 225 bp, Unknown; identical to SEQ ID NO: 4528
  bacterial strain Ascusb_678A encodes 16S rRNA

SEQ ID NO: 4530 - DNA, 225 bp, Unknown; identical to SEQ ID NO: 4528
  bacterial strain Ascusb_560A encodes 16S rRNA

SEQ ID NO: 4531 - DNA, 225 bp, Unknown
  bacterial strain Ascusb_3689A encodes 16S rRNA
agagtttgatcatggctcaggattaacgctggcggcgtgcctaatacatgcaagtcgaatggtagcaataccatggcgaacgggtgagtaacacgtaggtaacctgtctttaagacgaggataaccgttggaaacgacggataatactcgataggtaattttagggcatcctaggattattaaagatttatcacttagagaggggcctgcggcgcattagctaga

SEQ ID NO: 4532 - DNA, 225 bp, Unknown; identical to SEQ ID NO: 4520
  bacterial strain Ascusb_994A encodes 16S rRNA

SEQ ID NO: 4533 - DNA, 225 bp, Unknown
  bacterial strain Ascusb_5201A encodes 16S rRNA
agagtttgatcctggctcaggacgaacgctggcggcgtgcctaacacatgcaagtcgagcgatgaagcccttcggggtgaattagcggcggacgggtgagtaacacgtgggtaacctgccttatagagggggatagccttccgaaaggaagattaataccgcatgaaatgtttttatcgcatggtagaaacatcaaaggagtaatccgctataagatggacccgc

SEQ ID NO: 4534 - DNA, 225 bp, Unknown; identical to SEQ ID NO: 4520
  bacterial strain Ascusb_3089B encodes 16S rRNA

SEQ ID NO: 4535 - DNA, 225 bp, Unknown
  bacterial strain Ascusb_2177A encodes 16S rRNA
agagtttgatcatggctcaggacgaacgctggcggcgtgcttaacacatgcaagtcgaacgaggtgattgaaagcttgcttttgagaaccgagtggcaaacgggtgagtaacgcgtagacaacctgccgcaaagatggggacaacagtccgaaaggactgctaataccgaatgttgtgcaacctccgcatggaggatgcattaaagatggcctctacttgtaagc

SEQ ID NO: 4536 - DNA, 225 bp, Unknown
  bacterial strain Ascusb_5891A encodes 16S rRNA
agagtttgatcatggctcaggatgaacgctagctacaggcttaacacatgcaagtcgaggggcagcatggtctagcaatagactgatggcgaccggcgcacgggtgagtaacacgtatccaacctaccggttattccgggatagcctttcgaaagaaagattaataccggatagtatagcgagaaggcatcttcttgttattaaagaatttcgataaccgatggg

SEQ ID NO: 4537 - DNA, 225 bp, Unknown; identical to SEQ ID NO: 4536
  bacterial strain Ascusb_8962A encodes 16S rRNA

SEQ ID NO: 4538 - DNA, 225 bp, Unknown; identical to SEQ ID NO: 4536
  bacterial strain Ascusb_3705A encodes 16S rRNA

SEQ ID NO: 4539 - DNA, 225 bp, Unknown
  bacterial strain Ascusb_2594A encodes 16S rRNA
agagtttgatcatggctcaggacgaacgctggcggcgtgcctaacacatgcaagtcgagcgaggagattcccttcggggatgaacctagcggcggacgggtgagtaacacgtgggcaacctgccttatagaggggaatagccttccgaaaggaagattaataccgcataacattacattttcgcatgaagaagtaattaaaggagtaatccgctataagatgggc

SEQ ID NO: 4540 - DNA, 225 bp, Unknown
  bacterial strain Ascusb_18804A encodes 16S rRNA
agagtttgatcatggctcaggacgaacgctggcggcgtgcctaatacatgcaagtcgaacgcattttctttcaccgtagcttgctacaccgaaagaaaatgagtggcgaacgggtgagtaacacgtgggtaacctgcccatcagcgggggataacacttggaaacaggtgctaataccgcataattccatttaccgcatggtagatgggtgaaaggcgcttttgc

SEQ ID NO: 4541 - DNA, 225 bp, Unknown
  bacterial strain Ascusb_344A encodes 16S rRNA
agagtttgatcctggctcaggacgaacgctggcggcgtgcttaacacatgcaagtcgagcgatgaagcttcttcgggagtggattagcggcggacgggtgagtaacacgtgggtaacctgcctcatagaggggaatagcctttcgaaaggaagattaataccgcatatggtagctttatcgcatggtaatgctattaaaggagtaatccgctatgagatggaccc

SEQ ID NO: 4542 - DNA, 225 bp, Unknown
  bacterial strain Ascusb_3349A encodes 16S rRNA
agagtttgatcctggctcaggacgaacgctggcggcgtgcctaatacatgcaagtcgaacgcattttctttcaccgtagcttgctacaccgaaagaaaatgagtggcgaacgggtgagtaacacgtgggtaacctgcccatcagcgggggataacacttggaaacaggtgctaataccgcataattccatttaccgcatggtaaatggatgaaaggcgcttttgc

SEQ ID NO: 4543 - DNA, 225 bp, Unknown
  bacterial strain Ascusb_317A encodes 16S rRNA
agagtttgatcctggctcaggatgaacgctagctacaggcttaacacatgcaagtcgaggggcagcatagggtttgcttgcaaaccctgatggcgaccggcgcacgggtgagtaacgcgtatccaacctgcccatggctagggaatagcccgttgaaaagcggattaatgccctatggcgtcctttgcagacatctaacgaggactaaaggtttaccggccatgg

SEQ ID NO: 4544 - DNA, 225 bp, Unknown
  bacterial strain Ascusb_2425A encodes 16S rRNA
agagtttgatcatggctcagaacgaacgctggtggcgtgtcttatacatgcaagtcgagcggtccgcaaggatagcggcgaacgggtgagtaacgcgtaagcaatctgccccgcatattgggatagccgtgccaacgcgcggataataccgaataacgtggccccggacatccggggttgacgaaagattcatcgatgcgggatgagcttgcgtccgattagcta

SEQ ID NO: 4545 - DNA, 225 bp, Unknown; identical to SEQ ID NO: 4516
  bacterial strain Ascusb_1661A encodes 16S rRNA

SEQ ID NO: 4546 - DNA, 225 bp, Unknown
  bacterial strain Ascusb_7297B encodes 16S rRNA
agagtttgatcatggctcaggacgaacgctggcggcgtgcttaacacatgcaagtcgaacggagcacccttgacagagacttcggtcaatagataggaatgcttagtggcggactggtgagtaacgcgtgaggaacctgcctttcagagggggacaacagttagaaatgactgctaataccgcatgatgcatagaggtcgcatggcctttatgtcaaagatttat

SEQ ID NO: 4547 - DNA, 225 bp, Unknown
  bacterial strain Ascusb_991A encodes 16S rRNA
agagtttgatcctggctcaggacgaacgctggcggcgtgcttaacacatgcaagtcgaacgaggtgattgaaagcttgcttttgagaaccgagtggcaaacgggtgagtaacgcgtagacaacctgccgcaaagatggggacaacagtccgaaaggactgctaataccgaatgttgtatcgtttccgcatggagatgatattaaagatggcctctacttgtaagc

SEQ ID NO: 4548 - DNA, 225 bp, Unknown
  bacterial strain Ascusb_275A encodes 16S rRNA
agagtttgatcatggctcaggacgaacgctggcggcgtgcttaacacatgcaagtcgaacgaggtgattgaaagcttgcttttgagaaccgagtggcaaacgggtgagtaacgcgtagacaacctgccgcaaagatggggacaacagtccgaaaggactgctaataccgaatgttgtcagttttccgcatgggagactgattaaagatggcctctacttgtaagc

SEQ ID NO: 4549 - DNA, 225 bp, Unknown
  bacterial strain Ascusb_3264B encodes 16S rRNA
agagtttgatcctggctcaggacgaacgctggcggcgtgcctaacacatgcaagtcgagcggagaaagttcttcggaactttcttagcggcggacgggtgagtaacacgtgggtaacctgccttatagagggggatagccttccgaaaggaagattaataccgcataacatttttgtttcgcatgaaataaaaatcaaaggagcaatccgctataagatggaccc

SEQ ID NO: 4550 - DNA, 225 bp, Unknown
  bacterial strain Ascusb_2272A encodes 16S rRNA
agagtttgatcctggctcaggacgaacgctggcggcgtgcctaacacatgcaagtcgagcggagttaattgaaagcttgcttttgattaacttagcggcggacgggtgagtaacgcgtgggcaacctgcctgttacagggggataacacagggaaacttgtgctaataccgcataacacaacgagaaagcattttcttgttgtcaaaggagcaatccggtaacag

SEQ ID NO: 4551 - DNA, 225 bp, Unknown
  bacterial strain Ascusb_3013A encodes 16S rRNA
agagtttgatcctggctcaggacgaacgctggcggcgtgcttaacacatgcaagtcgagcgaggaaattgcttcggtaatttcctagcggcggacgggtgagtaacacgtgggcaacctgcctgatagagggggatagcctcccgaaagggagattaataccgcataaagtcaaatgaaggcatcttcaaatgaccaaaggagtaatccgctatcagatgggccc

SEQ ID NO: 4552 - DNA, 225 bp, Unknown
  bacterial strain Ascusb_233A encodes 16S rRNA
agagtttgatcatggctcaggatgaacgctagctacaggcttaacacatgcaagtcgaggggcagcgggggcttagcttgctaagcttgccggcgaccggcgcacgggtgagtaacgcgtatccaaccttcccgcaggtagggaacagcccggcgaaagtcggattaatgccctatgatttcctttgatggcatctgatgaggaataaagatttatcgccggcgg

SEQ ID NO: 4553 - DNA, 225 bp, Unknown; identical to SEQ ID NO: 4552
  bacterial strain Ascusb_5387A encodes 16S rRNA

SEQ ID NO: 4554 - DNA, 225 bp, Unknown; identical to SEQ ID NO: 987
  bacterial strain Ascusb_211A encodes 16S rRNA

SEQ ID NO: 4555 - DNA, 225 bp, Unknown
  bacterial strain Ascusb_4058B encodes 16S rRNA
agagtttgatcctggctcaggacgaacgctggcggcgtgtctaatacatgcaagtcgagcgagctgaattcaaagatcccttcggggtgatttgttggacgctagcggcggatgggtgagtaacacgtgggcaatctgccctaaagactgggataccacttggaaacaggtgctaataccggataacaacatgaatcgcatgattcaagtttgaaaggcggcgca

SEQ ID NO: 4556 - DNA, 225 bp, Unknown
  bacterial strain Ascusb_724A encodes 16S rRNA
agagtttgatcctggctcaggatgaacgctagctacaggcttaacacatgcaagtcgaggggaaacgacatagagtgcttgcactttatgggcgtcgaccggcgaatgggtgagtaacgcgtatccaacctgcccttgaccgagggatagcccagtgaaaactgaattaatacctcatgttctcctcagacggcatcagacgaggagcaaagattaatcggtcaa

SEQ ID NO: 4557 - DNA, 225 bp, Unknown; identical to SEQ ID NO: 4556
  bacterial strain Ascusb_2027A encodes 16S rRNA

SEQ ID NO: 4558 - DNA, 225 bp, Unknown; identical to SEQ ID NO: 4556
  bacterial strain Ascusb_2886B encodes 16S rRNA

SEQ ID NO: 4559 - DNA, 225 bp, Unknown
  bacterial strain Ascusb_2684A encodes 16S rRNA
agagtttgatcatggctcaggatgaacgctggcggcgtgcttaacacatgcaagtcgaacgaactgtattaaaggaagttttcggatggaatttaatatagttagtggcggacgggtgagtaacgcgtgggaaacctgccctatacagggggatagcctcgggaaaccgggattaataccccatgaagctctaatatcgcatgatatatgggtcaaagatttatc

SEQ ID NO: 4560 - DNA, 225 bp, Unknown; identical to SEQ ID NO: 4559
  bacterial strain Ascusb_12328A encodes 16S rRNA

SEQ ID NO: 4561 - DNA, 225 bp, Unknown; identical to SEQ ID NO: 4559
  bacterial strain Ascusb_10412A encodes 16S rRNA

SEQ ID NO: 4562 - DNA, 225 bp, Unknown; identical to SEQ ID NO: 4559
  bacterial strain Ascusb_7360B encodes 16S rRNA

SEQ ID NO: 4563 - DNA, 225 bp, Unknown
  bacterial strain Ascusb_168B encodes 16S rRNA
agagtttgatcatggctcaggatgaacgctgacagaatgcttaacacatgcaagtctacttgaattcacttcggtgatagtaaggtggcggacgggtgagtaacacgtaaagaacttgccttgcagtctgggacaactattggaaacgatagctaataccggatattatgcgtgagtcgcatgactcatgtatgaaagctatatgcgctgcgagagagctttgcg

SEQ ID NO: 4564 - DNA, 225 bp, Unknown; identical to SEQ ID NO: 4208
  bacterial strain Ascusb_4736A encodes 16S rRNA

SEQ ID NO: 4565 - DNA, 225 bp, Unknown
  bacterial strain Ascusb_1985B encodes 16S rRNA
agagtttgatcatggctcaggatgaacgctagctacaggcttaacacatgcaagtcgaggggcatcattatcgaagcttgctttgatagatggcgaccggcgcacgggtgagtaacgcgtatccaaccttccccttagtagggcacagcccggcgaaagtcggattaattccctatgttgtttgatgctgacatcaaaatcaaaccaaagattcatcgctaaggg

SEQ ID NO: 4566 - DNA, 225 bp, Unknown; identical to SEQ ID NO: 4565
  bacterial strain Ascusb_14185A encodes 16S rRNA

SEQ ID NO: 4567 - DNA, 225 bp, Unknown; identical to SEQ ID NO: 4565
  bacterial strain Ascusb_3092A encodes 16S rRNA

SEQ ID NO: 4568 - DNA, 225 bp, Unknown; identical to SEQ ID NO: 4565
  bacterial strain Ascusb_4173A encodes 16S rRNA

SEQ ID NO: 4569 - DNA, 225 bp, Unknown
  bacterial strain Ascusb_115A encodes 16S rRNA
agagtttgatcctggctcagattgaacgctggcggcaggcctaacacatgcaagtcgagcggtagcacagagagcttgctctcgggtgacgagcggcggacgggtgagtaatgtctgggaaactgcctgatggagggggataactactggaaacggtagctaataccgcataatgtcgcaagaccaaagtgggggaccttcgggcctcatgccatcagatgtgcc

SEQ ID NO: 4570 - DNA, 225 bp, Unknown
  bacterial strain Ascusb_6373A encodes 16S rRNA
agagtttgatcctggctcaggacgaacgctggcggcgtgcctaatacatgcaagtcgaacgaactctggtattgattggtgcttgcatcatgatttacatttgagtgagtggcgaactggtgagtaacacgtgggaaacctgcccagaagcgggggataacacctggaaacagatgctaataccgcataacaacttggaccgcatggtccgagtttgaaagatgg

SEQ ID NO: 4571 - DNA, 225 bp, Unknown; identical to SEQ ID NO: 4569
  bacterial strain Ascusb_17947B encodes 16S rRNA

SEQ ID NO: 4572 - DNA, 225 bp, Unknown
  bacterial strain Ascusb_2831A encodes 16S rRNA
agagtttgatcctggctcaggacgaacgctggcggcgtgcctaatacatgcaagtcgagcgatgtctttgggggcttgcccccgaagatgtagcggcggacgggtgagtaacacgtgggcaacctgcctgtaagactgggataacttcgggaaaccggagctaataccggataactcaagaaaccacatggtttcttgctaaaagatggctccggctatcactta

SEQ ID NO: 4573 - DNA, 225 bp, Unknown
  bacterial strain Ascusb_1139B encodes 16S rRNA
agagtttgatcatggctcaggatgaacgctagctacaggcttaacacatgcaagtcgaggggcagcgtgtacaggtgcttgcaccagtatgacggcgaccggcgcacgggtgagtaacgcgtatccaacctgccatatactcgggtatagcccggtgaaaaccgaattaacccccgatagtgtcctttgcaggcatctaattaggactaaagttcacggtatatg

SEQ ID NO: 4574 - DNA, 225 bp, Unknown
  bacterial strain Ascusb_10375A encodes 16S rRNA
agagtttgatcctggctcaggacgaacgctggcggcgtgcttaacacatgcaagtcgaacgagacgaattagaagcttgcttttgacgagtcgagtggcaaacgggtgagtaacgcgtagacaacctgccgcaaagatggggacaacagtccgaaaggactgctaataccgaatgttgtatctccaccgcatggaagagatattaaagatggcctctacttgtaa

SEQ ID NO: 4575 - DNA, 225 bp, Unknown; identical to SEQ ID NO: 4574
  bacterial strain Ascusb_15111A encodes 16S rRNA

SEQ ID NO: 4576 - DNA, 225 bp, Unknown; identical to SEQ ID NO: 4574
  bacterial strain Ascusb_10976A encodes 16S rRNA

SEQ ID NO: 4577 - DNA, 225 bp, Unknown
  bacterial strain Ascusb_8024B encodes 16S rRNA
agagtttgatcatggctcaggatgaacgctagctacaggcttaacacatgcaagtcgaggggaaacgatgagagagcttgctctctcaggcgtcgaccggcgcacgggtgagtaacacgtatccaacctgcctttttccagggaataaccttgcgaaagtaagactaatgccctatgtgtccttcgacggcatcagacgaggacgaaagattcatcggaaaggga

SEQ ID NO: 4578 - DNA, 225 bp, Unknown
  bacterial strain Ascusb_120B encodes 16S rRNA
agagtttgatcctggctcaggacgaacgctggcggcgtgcttaacacatgcaagtcgaacggaacacccttgacagaggtttcggccaatgaagaggaatgtttagtggcggactggtgagtaacgcgtgaggaacctgcctttcagagggggacaacagttggaaacgactgctaataccgcatgaagcaacgaggggacatccccttgctgtcaaagatttat

SEQ ID NO: 4579 - DNA, 225 bp, Unknown
  bacterial strain Ascusb_1187A encodes 16S rRNA
agagtttgatcatggctcaggacgaacgctggcggcgtgcctaacacatgcaagtcgagcggagatgatttgaagtttactttgggttgtcttagcggcggacgggtgagtaacgcgtgggcaacctgcctttcacagggggataacacagggaaacttgtgctaataccgcataacacagcgaggtagcattaccttgttgtcaaaggagcaatccggtgatag

SEQ ID NO: 4580 - DNA, 225 bp, Unknown
  bacterial strain Ascusb_10663A encodes 16S rRNA
agagtttgatcctggctcaggacgaacgctggcggcgtgcttaacacatgcaagtcgaacgagacgattttaagcttgcttagatgagtcgagtggcaaacgggtgagtaacgcgtagacaacctgccgcaaagatggggacaacagtccgaaaggactgctaataccgaatgttgtgcaacctccgcatggaggatgcattaaagatggcctctacttgtaagc

SEQ ID NO: 4581 - DNA, 225 bp, Unknown; identical to SEQ ID NO: 3703
  bacterial strain Ascusb_1989A encodes 16S rRNA

SEQ ID NO: 4582 - DNA, 225 bp, Unknown; identical to SEQ ID NO: 3703
  bacterial strain Ascusb_132B encodes 16S rRNA

SEQ ID NO: 4583 - DNA, 225 bp, Unknown; identical to SEQ ID NO: 3703
  bacterial strain Ascusb_3718B encodes 16S rRNA

SEQ ID NO: 4584 - DNA, 225 bp, Unknown
  bacterial strain Ascusb_1203A encodes 16S rRNA
agagtttgatcatggctcaggacgaacgctggcggcgtgcctaatacatgcaagtcgaacgaactctggtattgattggtgcttgcatcatgatttacatttgagtgagtggcgaactggtgagtaacacgtgggaaacctgcccagaagcgggggataacacctggaaacagatgctaataccgcataacaacttggaccgcatggtccaagtttgaaagatgg

SEQ ID NO: 4585 - DNA, 225 bp, Unknown
  bacterial strain Ascusb_112A encodes 16S rRNA
agagtttgatcatggctcaggacgaacgctggcggcgtgcttaacacatgcaagtcgaacgaggtgattgaaagcttgcttttgagaaccgagtggcaaacgggtgagtaacgcgtagacaacctgccgcaaagatggggacaacagtccgaaaggactgctaataccgaatgttgtcaagtttccgcatgggagcttgattaaagatggcctctacttgtaagc

SEQ ID NO: 4586 - DNA, 225 bp, Unknown
  bacterial strain Ascusb_2434A encodes 16S rRNA
agagtttgatcctggctcaggatgaacgctagctacaggcttaacacatgcaagtcgaggggaaacgacagagagtgcttgcactttttgggcgtcgaccggcgaatgggtgagtaacgcgtatccaacctgcccttgactgagggatagcccagtgaaaactgaattaatacctcatgttctcctcagacggcatcagacgaggagcaaagattaatcggtcaa

SEQ ID NO: 4587 - DNA, 225 bp, Unknown; identical to SEQ ID NO: 4586
  bacterial strain Ascusb_3663A encodes 16S rRNA

SEQ ID NO: 4588 - DNA, 225 bp, Unknown; identical to SEQ ID NO: 4577
  bacterial strain Ascusb_3879B encodes 16S rRNA

SEQ ID NO: 4589 - DNA, 225 bp, Unknown
  bacterial strain Ascusb_10845A encodes 16S rRNA
agagtttgatcatggctcagattgaacgctggcggcaggcctaacacatgcaagtcgaacggtaacaggaagcagcttgctgcttcgctgacgagtggcggacgggtgagtaatgtctgggaaactgcctgatggagggggataactactggaaacggtagctaataccgcataacgtcgcaagaccaaagagggggaccttcgggcctcttgccatcagatgtg

SEQ ID NO: 4590 - DNA, 225 bp, Unknown; identical to SEQ ID NO: 4574
  bacterial strain Ascusb_15117A encodes 16S rRNA

SEQ ID NO: 4591 - DNA, 225 bp, Unknown
  bacterial strain Ascusb_927A encodes 16S rRNA
agagtttgatcctggctcaggatgaacgccggcggtgtgcctaatacatgcaagtcgaacgcgttggcccgattgattgatggtgcttgcacctgattgattttggtcgccaacgagtggcggacgggtgagtaacacgtaggtaacctgcccagaagcgggggacaacatttggaaacagatgctaataccgcataacaacgttgttcgcatgaacaacgctta

SEQ ID NO: 4592 - DNA, 225 bp, Unknown; identical to SEQ ID NO: 4135
  bacterial strain Ascusb_2143A encodes 16S rRNA

SEQ ID NO: 4593 - DNA, 225 bp, Unknown
  bacterial strain Ascusb_9020A encodes 16S rRNA
agagtttgatcctggctcaggatgaacgctagctacaggcttaacacatgcaagtcgaggggcagcgagaagagagcttgctttctttgtcggcgaccggcgcacgggtgagtaacgcgtatccaaccttccccatagtagaggatagcccggcgaaagtcggattaatactctatgttgtattttgaggacatctgacgaataccaaagattgatcgctatggg

SEQ ID NO: 4594 - DNA, 225 bp, Unknown
  bacterial strain Ascusb_3047A encodes 16S rRNA
agagtttgatcctggctcaggatgaacgctggcggcgtgcctaacacatgcaagtcgagcgggctgacgctcaacactgagaattcagtattttgtctaaatagccaccgtcaaggacgaaagtatggagtccttcacgcgttatttaagtgacaacacatgttgcaaagtgaactgaattttgagtgttgagcggaagctagcggcggacgggtgagtaacgcg

SEQ ID NO: 4595 - DNA, 225 bp, Unknown; identical to SEQ ID NO: 4594
  bacterial strain Ascusb_1784A encodes 16S rRNA

SEQ ID NO: 4596 - DNA, 225 bp, Unknown; identical to SEQ ID NO: 4041
  bacterial strain Ascusb_239B encodes 16S rRNA

SEQ ID NO: 4597 - DNA, 225 bp, Unknown
  bacterial strain Ascusb_1726A encodes 16S rRNA
agagtttgatcatggctcaggatgaacgctagctacaggcttaacacatgcaagtcgaggggcagcattttagtttgcttgcaaactaaagatggcgaccggcgcacgggtgagtaacacgtatccaacctgccgataactcggggatagcctttcgaaagaaagattaatatccgatggtatattaaaaccgcatggttttactattaaagaatttcggttatc

SEQ ID NO: 4598 - DNA, 225 bp, Unknown; identical to SEQ ID NO: 4597
  bacterial strain Ascusb_5956A encodes 16S rRNA

SEQ ID NO: 4599 - DNA, 225 bp, Unknown
  bacterial strain Ascusb_3859A encodes 16S rRNA
agagtttgatcctggctcaggatgaacgctagctacaggcttaacacatgcaagtcgaggggaaacgatgagagagcttgctctctcaggcgtcgaccggcgcacgggtgagtaacacgtatccaacctgcctttttccagggaataaccttgcgaaagtaagactaatgccctatgtgtcctttgacggcatcagacgaggacgaaagattcatcggaaaggga

SEQ ID NO: 4600 - DNA, 225 bp, Unknown
  bacterial strain Ascusb_12803A encodes 16S rRNA
agagtttgatcatggctcaggacgaacgctggcggcgtgcttaacacatgcaagtcgaacgaggcagattttcaacactgaatgcttgaaggcgatgctttcgagcgtcgtgatggcgaagccatcaccacacttatataaagtgattcacataagtgatggttggtcgagcattgagtgttgaaaagatgccgagtggcaaacgggtgagtaacgcgtagacaa

SEQ ID NO: 4601 - DNA, 225 bp, Unknown; identical to SEQ ID NO: 4600
  bacterial strain Ascusb_11494A encodes 16S rRNA

SEQ ID NO: 4602 - DNA, 225 bp, Unknown
  bacterial strain Ascusb_2590B encodes 16S rRNA
agagtttgatcatggctcaggacgaacgctggcggcgtgcttaacacatgcaagtcgaacgagacgattgaaagcttgcttttgagagtcgagtggcaaacgggtgagtaacgcgtagacaacctgccgcaaagatggggacaacagtccgaaaggactgctaataccgaatgttgtgcaacctccgcatggaggatgcattaaagatggcctctacttgtaagc

SEQ ID NO: 4603 - DNA, 225 bp, Unknown
  bacterial strain Ascusb_2191A encodes 16S rRNA
agagtttgatcatggctcaggatgaacgctagctacaggcttaacacatgcaagtcgaggggaaacgacagagagtgcttgcactttttgggcgtcgaccggcgaatgggtgagtaacgcgtatccaacctgcccttgactgagggatagcccagtgaaaactgaattaatacctcatgttctcctccgacggcatcagacgaggagcaaagattaatcggtcaa

SEQ ID NO: 4604 - DNA, 225 bp, Unknown; identical to SEQ ID NO: 4603
  bacterial strain Ascusb_3089A encodes 16S rRNA

SEQ ID NO: 4605 - DNA, 225 bp, Unknown
  bacterial strain Ascusb_9216A encodes 16S rRNA
agagtttgatcatggctcaggatgaacgctagctacaggcttaacacatgcaagtcgaggggcagcatggggtttgcttgcaaactctgatggcgaccggcgcacgggtgagtaacgcgtatccaacctgcccatggctagggaatagcccgttgaaaagcggattaatgccctatggcgtcctttgcagacatctaacgaggactaaaggtttaccggccatgg

SEQ ID NO: 4606 - DNA, 225 bp, Unknown
  bacterial strain Ascusb_3606A encodes 16S rRNA
agagtttgatcatggctcaggacgaacgctggcggcgtgcttaacacatgcaagtcgaacgaggtgattgaaagcttgcttttgagaaccgagtggcaaacgggtgagtaacgcgtagacaacctgccgcaaagatggggacaacagtccgaaaggactgctaataccgaatgttgtcaagcttccgcatgggagcttgattaaagatggcctctacttgtaagc

SEQ ID NO: 4607 - DNA, 225 bp, Unknown
  bacterial strain Ascusb_1588A encodes 16S rRNA
agagtttgatcatggctcaggacgaacgctggcggcgtgcctaacacatgcaagtcgagcgagaggaacccttcggggtgaatctagcggcggacgggtgagtaacacgtgggtaacctgcctcaaagagggggatagccctccgaaaggaggattaataccgcataaagttggtagttcgcatgaacaaccaaccaaaggagcaatccgctttgagatggaccc

SEQ ID NO: 4608 - DNA, 225 bp, Unknown
  bacterial strain Ascusb_239A encodes 16S rRNA
agagtttgatcctggctcaggacgaacgctggcggcgtgcctaacacatgcaagtcgagcgaagttttcaaagcagatttcttcggaatgaaactttgattatcttagcggcggacgggtgagtaacgcgtgagaaacctgcctttcacaaagggatagcctcgggaaactgggattaataccttatgacacttaagagtcgcatgacttttaagtcaaagcgta

SEQ ID NO: 4609 - DNA, 225 bp, Unknown
  bacterial strain Ascusb_2485A encodes 16S rRNA
agagtttgatcctggctcaggacgaacgctggcggcgtgcttaacacatgcaagtcgaacgagaagagatgagaagcttgcttcttattgattcgagtggcaaacgggtgagtaacgcgtaagcaacctgcccttcagatggggacaacagctggaaacggctgctaataccgaatacgttctttctgccgcatgacagagggaagaaagggaggctcttcggag

SEQ ID NO: 4610 - DNA, 225 bp, Unknown; identical to SEQ ID NO: 4609
  bacterial strain Ascusb_5231A encodes 16S rRNA

SEQ ID NO: 4611 - DNA, 225 bp, Unknown
  bacterial strain Ascusb_51A encodes 16S rRNA
agagtttgatcctggctcaggacgaacgctggcggcgtgcctaatacatgcaagtagaacgctgaagactttagcttgctaaagttggaagagttgcgaacgggtgagtaacgcgtaggtaacctgcctactagcgggggataactactggaaacggtagctaataccgcataacgtcgcaagaccaaagtgggggaccttcgggcctcatgccatcagatgtgc

SEQ ID NO: 4612 - DNA, 225 bp, Unknown
  bacterial strain Ascusb_5315A encodes 16S rRNA
agagtttgatcatggctcaggacgaacgctggcggcgtgcttaacacatgcaagtcgaacgagaggaattgaaaagcttgctttttaatgaatcgagtggcaaacgggtgagtaacacgtaaacaacctgccttcaggatggggacaacagacggaaacgactgctaataccgaataccttccaagagccgcatgacacctggaagaaagggtggcctctacctg

SEQ ID NO: 4613 - DNA, 225 bp, Unknown
  bacterial strain Ascusb_295A encodes 16S rRNA
agagtttgatcatggctcaggatgaacgctagctacaggcttaacacatgcaagtcgaggggtaacgacagcgaaagcttgcttttgctggtcgacgaccggcgaatgggtgagtaacgcgtatccaacctgccgcaaagtagggcacagccttgcgaaagtaagattaatgccctatgtgctgtgatgatgacatcagaattgcagtaaaggttcaccgctttg

SEQ ID NO: 4614 - DNA, 225 bp, Unknown
  bacterial strain Ascusb_1760A encodes 16S rRNA
agagtttgatcatggctcaggacgaacgctggcggcgtgcttaacacatgcaagtcgaacgagacgattgaaagcttgcttttgaaagtcgagtggcaaacgggtgagtaacgcgtagacaacctgccgcaaagatggggacaacagtccgaaaggactgctaataccgaatgttgtatctttcctgcatgggagagatattaaagatggcctctacttgtaagc

SEQ ID NO: 4615 - DNA, 225 bp, Unknown
  bacterial strain Ascusb_2890A encodes 16S rRNA
agagtttgatcatggctcaggacgaacgctggcggcgtgcttaacacatgcaagtcgaacgagacggatagaagcttgcttttagaagtcgagtggcaaacgggtgagtaacgcgtagacaacctgcctctgggatggggacaacagcccgaaagggctgctaataccgaatgaaatggtttcttctcctgaagagatcatgaaagatggcctctatttataagc

SEQ ID NO: 4616 - DNA, 225 bp, Unknown
  bacterial strain Ascusb_5168B encodes 16S rRNA
agagtttgatcatggctcaggacgaacgctggcggcgtgcctactccctgcacgtcgaccgcttcctcctttctctttctccctttggaagagttgcgaacgggtgagtaacgcgtaggtaacctgcctactagcgggggataactattggaaacgatagctaataccgcataacagcatttaacacatgttagatgcttgaaaggagcaattgcttcactagta

SEQ ID NO: 4617 - DNA, 225 bp, Unknown; identical to SEQ ID NO: 4616
  bacterial strain Ascusb_6642B encodes 16S rRNA

SEQ ID NO: 4618 - DNA, 225 bp, Unknown
  bacterial strain Ascusb_2987A encodes 16S rRNA
agagtttgatcctggctcaggatgaacgctagctacaggcttaacacatgcaagtcgaggggaaacgacagagagtgcttgcactttttgggcgtcgaccggcgaatgggtgagtaacgcgtatccaacctgcccttgactgagggatagcccagtgaaaactgaattaatacctcatgtcctcctccgacggcatcagacgaggagcaaagattaatcggtcaa

SEQ ID NO: 4619 - DNA, 225 bp, Unknown
  bacterial strain Ascusb_4119A encodes 16S rRNA
agagtttgatcatggctcaggacgaacgctggcggcgtgcctaatacatgcaagtcgaacgcttttctttccatcggagcttgctccaccggaaagaaaagagtggcgaacgggtgagtaacacgtgggtaacctgccctcaagcgggggataacacttggaaacaggtgctaataccgcataacaatagaaggagcatttcttctgtttgaaagtcgcaactgc

SEQ ID NO: 4620 - DNA, 225 bp, Unknown
  bacterial strain Ascusb_64A encodes 16S rRNA
agagtttgatcctggctcaggatgaacgctagctacaggcttaacacatgcaagtcgaggggcagcatgaacttagcttgctaagtttgatggcgaccggcgcacgggtgagtaacgcgtatccaacctggcccttagtaggggatagcccggcgaaagtcggattaataccctatgttttccgaagcgagcattcaatttggaacaaagattcatcgctaaggg

SEQ ID NO: 4621 - DNA, 225 bp, Unknown
  bacterial strain Ascusb_4286A encodes 16S rRNA
agagtttgatcctggctcaggacgaacgctggcggcgtgcttaacacatgcaagtcgaacgagacgattgaaagcttgcttttgagagtcgagtggcaaacgggtgagtaacgcgtagacaacctgccgcaaagatggggacaacagtccgaaaggactgctaataccgaatgttgtgcaacctccgcatggaggatgcattaaagatggcctctacttgtaagc

SEQ ID NO: 4622 - DNA, 225 bp, Unknown; identical to SEQ ID NO: 4621
  bacterial strain Ascusb_9898A encodes 16S rRNA

SEQ ID NO: 4623 - DNA, 225 bp, Unknown; identical to SEQ ID NO: 4621
  bacterial strain Ascusb_430A encodes 16S rRNA

SEQ ID NO: 4624 - DNA, 225 bp, Unknown
  bacterial strain Ascusb_254A encodes 16S rRNA
agagtttgatcatggctcaggacgaacgctggcggcgtgcttaacacatgcaagtcgaacggagaacttatttcggtaagttcttagtggcgaacgggtgagtaacgcgtaggcaacctgccctccagttggggacaacattccgaaagggatgctaataccgaatacgatggatttcccgcatgagggatccatgaaaggcgctttcgggcgtcgctggaagat

SEQ ID NO: 4625 - DNA, 225 bp, Unknown; identical to SEQ ID NO: 1960
  bacterial strain Ascusb_9421A encodes 16S rRNA

SEQ ID NO: 4626 - DNA, 225 bp, Unknown
  bacterial strain Ascusb_1618A encodes 16S rRNA
agagtttgatcctggctcagattgaacgctggcggcaggcctaacacatgcaagtcgaacggtaacaggaagcagcttgctgcttcgctgacgagtggcggacgggtgagtaatgtctgggaaactgcccgatggagggggataactactggaaacggtagctaataccgcataacgtcgcaagaccaaagagggggaccttcgggcctcttgccatcggatgtg

SEQ ID NO: 4627 - DNA, 225 bp, Unknown
  bacterial strain Ascusb_20052A encodes 16S rRNA
agagtttgatcatggctcaggatgaacgctggcggcgtgcctaacacatgcaagtcgaacgagatccattaattgaagcttcggcagattttaggaagatcgagtggcggacgggtgagtaacgcgtgggtaacctgccttacagagggggataacagagagaaatttctgctaataccgcataagcacacagtaccgcatggtacagggtgaaaagatttatca

SEQ ID NO: 4628 - DNA, 225 bp, Unknown
  bacterial strain Ascusb_386A encodes 16S rRNA
agagtttgatcatggctcaggatgaacgctagcgacaggcttaacacatgcaagtcgaggggcatcatgatttgtagcaatacgaattgatggcgaccggcgcacgggtgagtaacgcgtatgcaacctacctatcagagagggataacccggcgaaagtcggactaatacctcataaaacaggggtcccgcatgggaatatttgttaaaggattaattgctgat

SEQ ID NO: 4629 - DNA, 225 bp, Unknown; identical to SEQ ID NO: 4628
  bacterial strain Ascusb_1419A encodes 16S rRNA

SEQ ID NO: 4630 - DNA, 225 bp, Unknown
  bacterial strain Ascusb_13271A encodes 16S rRNA
agagtttgatcctggctcaggacgaacgctggcggcgtgcctaacacatgcaagtcgagcgaagtttttaaagaagatttcttcggaatgaaactttaattatcttagcggcggacgggtgagtaacgcgtgagaaacctgccttttacaaagggatagcctcgggaaactgggattaataccttatgacacttaaatgtcgcatgagatttaagtcaaagcgta

SEQ ID NO: 4631 - DNA, 225 bp, Unknown
  bacterial strain Ascusb_12149A encodes 16S rRNA
agagtttgatcctggctcaggacgaacgctggcggcgtgcttaacacatgcaagtcgaacgagacgattttaagcttgcttagatgagtcgagtggcaaacgggtgagtaacgcgtagacaacctgccgcaaagatggggacaacagtccgaaaggactgctaataccgaatgttgtcagtttctcgcatgagagactgattaaagatggcctctacttgtaagc

SEQ ID NO: 4632 - DNA, 225 bp, Unknown
  bacterial strain Ascusb_2606A encodes 16S rRNA
agagtttgatcctggctcaggacgaacgctggcggcgtgcctaatacatgcaagtcgagcggactttaaaagcttgcttttaaagttagcggcggacgggtgagtaacacgtgggcaacctgcctgtaagactgggataacttcgggaaaccggagctaataccggataatccttttcctctcatgaggaaaagctgaaagacggtttacgctgtcacttacaga

SEQ ID NO: 4633 - DNA, 225 bp, Unknown
  bacterial strain Ascusb_4791A encodes 16S rRNA
agagtttgatcatggctcaggacgaacgctggcggcgtgcttaacacatgcaagtcgaacgagaagagatgagaagcttgcttcttattgattcgagtggcaaacgggtgagtaacgcgtaggcaacctgccctccagttggggacaacattccgaaagggatgctaataccgaatacgatgggtttcccgcatgaggaacccatgaaaggcgctttcgggcgtc

SEQ ID NO: 4634 - DNA, 225 bp, Unknown
  bacterial strain Ascusb_688A encodes 16S rRNA
agagtttgatcatggctcagattgaacgctggcggcaggcctaacacatgcaagtcgaacggtaacaggaagcagcttgctgcttcgctgacgagtggcggacgggtgagtaatgtctgggaaactgcctgatggagggggataactactggaaacggtagctaataccgcataatgtcgcaagaccaaagtgggggaccttcgggcctcatgccatcagatgtg

SEQ ID NO: 4635 - DNA, 225 bp, Unknown
  bacterial strain Ascusb_19080A encodes 16S rRNA
agagtttgatcatggctcaggacgaacgctggcggcgtgcctaatacatgcaagtagaacgctgaagactttagcttgctaaagttggaagagttgcgaacgggtgagtaacgcgtaggtaacctgcctactagcgggggataactattggaaacgatagctaataccgcataacagtttttaacacatgttagaaatttgaaaggagcaattgcttcactagga

SEQ ID NO: 4636 - DNA, 225 bp, Unknown; identical to SEQ ID NO: 4498
  bacterial strain Ascusb_126A encodes 16S rRNA

SEQ ID NO: 4637 - DNA, 225 bp, Unknown
  bacterial strain Ascusb_2792A encodes 16S rRNA
agagtttgatcctggctcaggacgaacgctggcggcgtgcttaacacatgcaagtcgaacgagacggattgaaagcttgcttttgaaatgtcgagtggcaaacgggtgagtaacgcgtagacaacctgccgcaaagatggggacaacagtccgaaaggactgctaataccgaatgttgtcagttttccgcatgggagactgattaaagatggcctctacttgtaa

SEQ ID NO: 4638 - DNA, 225 bp, Unknown
  bacterial strain Ascusb_4492A encodes 16S rRNA
agagtttgatcctggctcaggacgaacgctggcggcgcgcttaacacatgcaagtcgagcgatgaagttttaacagattccttcgggatgaagataaaatggattagcggcggacgggtgagtaacacgtgagtaacctgcctttgacatcgggatagcctcgggaaaccgggattaataccgaatgaaattcttaatacgcatgtataaagaatcaaaactacg

SEQ ID NO: 4639 - DNA, 225 bp, Unknown; identical to SEQ ID NO: 4092
  bacterial strain Ascusb_1961A encodes 16S rRNA

SEQ ID NO: 4640 - DNA, 225 bp, Unknown
  bacterial strain Ascusb_453A encodes 16S rRNA
agagtttgatcatggctcaggatgaacgctagctacaggcttaacacatgcaagtcgaggggaaacgacagagagtgcttgcactttttgggcgtcgaccggcgaatgggtgagtaacgcgtatccaacctgcccttgactgagggatagcccagtgaaaactgaattaatacctcatatcctcctcagacggcatcagacgaggagtaaagatttatcggtcaa

SEQ ID NO: 4641 - DNA, 225 bp, Unknown
  bacterial strain Ascusb_1794A encodes 16S rRNA
agagtttgatcctggctcaggacgaacgctggcggcgtgcttaacacatgcaagtcgaacgaggtgattgaaagcttgcttttgagaaccgagtggcaaacgggtgagtaacgcgtagacaacctgccgcaaagatggggacaacagtccgaaaggactgctaataccgaatgttgtgcaatctccgcatggaggatgcattaaagatggcctctacttgtaagc

SEQ ID NO: 4642 - DNA, 225 bp, Unknown
  bacterial strain Ascusb_489A encodes 16S rRNA
agagtttgatcctggctcagattgaacgctggcggcaggcttaacacatgcaagtcgtacggtaacagagggaagcttgcttctctgctgacgagtggcggacgggtgagtaatgtctgggaagctgcctgcttgagggggatagcggagcgaaagttccgataataccgcgtaagcccgagaggggaaagtgcgggaccgcaaggccgcacgcgagcagatgcg

SEQ ID NO: 4643 - DNA, 225 bp, Unknown
  bacterial strain Ascusb_2590A encodes 16S rRNA
agagtttgatcatggctcaggatgaacgctagctacaggcttaacacatgcaagtcgaggggaaacgacatagagtgcttgcactttatgggcgtcgaccggcgaatgggtgagtaacgcgtatccaacctgcccttgactgagggatagcccagtgaaaactgaattaatacctcatgtactcctcagacggcatcagacgaggagcaaagattaatcggtcaa

SEQ ID NO: 4644 - DNA, 225 bp, Unknown
  bacterial strain Ascusb_1340A encodes 16S rRNA
agagtttgatcatggctcagattgaacgctggcggcaggcctaacacatgcaagtcgagcggcagcggaaagtagcttgctactttgccggcgagcggcggacgggtgagtaatgtctgggaaactgcctgatggagggggataactactggaaacggtagctaataccgcataatgtcgcaagaccaaagtgggggaccttcgggcctcatgccatcagatgtg

SEQ ID NO: 4645 - DNA, 225 bp, Unknown; identical to SEQ ID NO: 4259
  bacterial strain Ascusb_4420A encodes 16S rRNA

SEQ ID NO: 4646 - DNA, 225 bp, Unknown; identical to SEQ ID NO: 4213
  bacterial strain Ascusb_3590A encodes 16S rRNA

SEQ ID NO: 4647 - DNA, 225 bp, Unknown
  bacterial strain Ascusb_4971A encodes 16S rRNA
agagtttgatcatggctcaggacgaacgctggcggcgtgcttaacacatgcaagtcgaacgaggtgattgaaagcttgcttttgagaaccgagtggcaaacgggtgagtaacgcgtagacaacctgccgcaaagatggggacaacagtccgaaaggactgctaataccgaatgttgtatcgtttccgcatggagatgatattaaagatggcctctacttgtaagc

SEQ ID NO: 4648 - DNA, 225 bp, Unknown
  bacterial strain Ascusb_325A encodes 16S rRNA
agagtttgatcctggctcagattgaacgctggcggcaggcctaacacatgcaagtcgagcggtaacacagggagcttgctcccgggtgacgagcggcggacgggtgagtaatgtctgggaaactgcctgatggagggggataactactggaaacggtagctaataccgcataacgtcgcaagaccaaagagggggaccttcgggcctcttgccatcagatgtgcc

SEQ ID NO: 4649 - DNA, 225 bp, Unknown
  bacterial strain Ascusb_3264A encodes 16S rRNA
agagtttgatcctggctcagattgaacgctggcggcaggcctaacacatgcaagtcgagcggcagcggaaagtagcttgctactttgccggcgagcggcggacgggtgagtaatgtctgggaaactgcctgatggagggggataactactggaaacggtagctaataccgcataatgtcgcaagaccaaagagggggaccttcgggcctcttgccatcagatgtg

SEQ ID NO: 4650 - DNA, 225 bp, Unknown
  bacterial strain Ascusb_6655A encodes 16S rRNA
agagtttgatcatggctcaggatgaacgctagctacaggcttaacacatgcaagtcgaggggcagcagggagatagcttgctatctttgctggcgaccggcgcacgggtgagtaacgcgtatccaaccttccccttactagaggatagcccggcgaaagtcggattaatactctatgttctcctttgcaggcatctaacgaggagcaaagattcatcggtaaggg

SEQ ID NO: 4651 - DNA, 225 bp, Unknown
  bacterial strain Ascusb_725A encodes 16S rRNA
agagtttgatcatggctcaggacgaacgctggcggcgtgcctaatacatgcaagtcgaacgcattttctttcaccgtagcttgctacaccgaaagaaaatgagtggcgaacgggtgagtaacacgtgggtaacctgcccatcagcgggggataacacttggaaacaggtgctaataccgcataattccatttaccgcatggtaaatggatgaaaggcgcttttgc

SEQ ID NO: 4652 - DNA, 225 bp, Unknown
  bacterial strain Ascusb_1715A encodes 16S rRNA
agagtttgatcctggctcagattgaacgctggcggcaggcctaacacatgcaagtcgagcggtaacacagggagcttgctcctgggtgacgagcggcggacgggtgagtaatgtctgggaaactgcctgatggagggggataactactggaaacggtagctaataccgcataacgtcgcaagaccaaagagggggaccttcgggcctcttgccatcagatgtgcc

SEQ ID NO: 4653 - DNA, 225 bp, Unknown
  bacterial strain Ascusb_1889A encodes 16S rRNA
agagtttgatcatggctcaggacgaacgctggcggcgtgcctaatacatgcaagtcgaacgcttctttttcatcgaacttcggttcatcgaaaaagaggagtggcgaacgggtgagtaacacgtgggtaacctgcccatcagaaggggataacacttggaaacaggtgctaataccgtataatactttttctcgcatgagaggaagttgaaaggcgcttttgcgt

SEQ ID NO: 4654 - DNA, 225 bp, Unknown
  bacterial strain Ascusb_5156A encodes 16S rRNA
agagtttgatcatggctcaggatgaacgctggcggcgtgcctaacacatgcaagtcgaacggaacttctttgacagaattcttcggaaggaagttgattaagtttagtggcggacgggtgagtaacgcgtgagtaacctgcctttgagaggggaataacttcccgaaagggatgctaataccgcataaagcatagaagtcgcatggcttttatgccaaagattta

SEQ ID NO: 4655 - DNA, 225 bp, Unknown
  bacterial strain Ascusb_383A encodes 16S rRNA
agagtttgatcatggctcaggattaacgctggcggcatgcctaatacatgcaagtcgaatgggtagcttgctatccatggcgaacgggtgagtaacacgtaggtaacctgtctttaagacgaggataacctttggaaacgaaggataatactggataggtcgttatagatcacatgattaaacgattaaagattataatgtcacttagagaggggcctgcggcgc

SEQ ID NO: 4656 - DNA, 225 bp, Unknown; identical to SEQ ID NO: 2063
  bacterial strain Ascusb_5168A encodes 16S rRNA

SEQ ID NO: 4657 - DNA, 225 bp, Unknown; identical to SEQ ID NO: 2063
  bacterial strain Ascusb_6642A encodes 16S rRNA

SEQ ID NO: 4658 - DNA, 225 bp, Unknown; identical to SEQ ID NO: 2063
  bacterial strain Ascusb_4355A encodes 16S rRNA

SEQ ID NO: 4659 - DNA, 225 bp, Unknown; identical to SEQ ID NO: 4064
  bacterial strain Ascusb_1305A encodes 16S rRNA

SEQ ID NO: 4660 - DNA, 225 bp, Unknown; identical to SEQ ID NO: 4064
  bacterial strain Ascusb_589A encodes 16S rRNA

SEQ ID NO: 4661 - DNA, 225 bp, Unknown; identical to SEQ ID NO: 4064
  bacterial strain Ascusb_19362A encodes 16S rRNA

SEQ ID NO: 4662 - DNA, 225 bp, Unknown
  bacterial strain Ascusb_813A encodes 16S rRNA
agagtttgatcctggctcaggacgaacgctggcggcgtgcctaacacatgcaagtcgagcgatgaaattccttcggggatggattagcggcggacgggtgagtaacacgtgggcaacctgcctcaaagtgggggatagccctccgaaaggaggattaataccgcataacattagttttccgcatgaaaaactaatcaaaggagtaatccgctttgagatgggccc

SEQ ID NO: 4663 - DNA, 225 bp, Unknown
  bacterial strain Ascusb_1259A encodes 16S rRNA
agagtttgatcctggctcagattgaacgctggcggcaggcttaacacatgcaagtcgaacggtaacgggaagaaagcttgctttctttgctgacgagtggcggacgggtgagtaaggcttgggaatctggcctatggagggggataactacgggaaactgtagctaataccgcgtaatctcttaggagaaaagtgtgggatcttcggaccacatgccataggatg

SEQ ID NO: 4664 - DNA, 225 bp, Unknown
  bacterial strain Ascusb_6094A encodes 16S rRNA
agagtttgatcatggctcagattgaacgctggcggcaggcctaacacatgcaagtcgaacggtaacaggaagcagcttgctgcttcgctgacgagtggcggacgggtgagtaatgtctgggaaactgcctgatggagggggataactactggaaacggtagctaataccgcataacgtcgaaagaccaaagagggggaccttcgggcctcttgccatcggatgtg

SEQ ID NO: 4665 - DNA, 225 bp, Unknown; identical to SEQ ID NO: 4062
  bacterial strain Ascusb_1139A encodes 16S rRNA

SEQ ID NO: 4666 - DNA, 225 bp, Unknown
  bacterial strain Ascusb_1985A encodes 16S rRNA
agagtttgatcctggctcaggatgaacgctagctacaggcttaacacatgcaagtcgaggggcagcatttttctagcaatagaagagatggcgaccggcgcacgggtgagtaacacgtatccaacctgccgataactccggaatagcctttcgaaagaaagattaataccggatagtatacgaatatcgcatgatatttttattaaagaatttcggttatcgatg

SEQ ID NO: 4667 - DNA, 225 bp, Unknown
  bacterial strain Ascusb_6413A encodes 16S rRNA
agagtttgatcctggctcagattgaacgctggcggcaggcctaacacatgcaagtcgaacggtagcacagaggagcttgctccttgggtgacgagtggcggacgggtgagtaatgtctgggaaactgcccgatggagggggataactactggaaacggtagctaataccgcataacgtcgcaagaccaaagagggggaccttcgggcctcttgccatcggatgtg

SEQ ID NO: 4668 - DNA, 225 bp, Unknown
  bacterial strain Ascusb_7297A encodes 16S rRNA
agagtttgatcctggctcagaacgaacgctggtggcgtgtcttatacatgcaagtcgagcggtccgcaaggatagcggcgaacgggtgagtaacgcgtaagcaatctgccccgcatattgggatagccgtgccaacgcgcggataataccgaataacgtggccccggacatccggggttgacgaaagattcatcgatgcgggatgagcttgcgtccgattagcta

SEQ ID NO: 4669 - DNA, 225 bp, Unknown; identical to SEQ ID NO: 4205
  bacterial strain Ascusb_3718A encodes 16S rRNA

SEQ ID NO: 4670 - DNA, 225 bp, Unknown; identical to SEQ ID NO: 4205
  bacterial strain Ascusb_132A encodes 16S rRNA

SEQ ID NO: 4671 - DNA, 225 bp, Unknown
  bacterial strain Ascusb_534A encodes 16S rRNA
agagtttgatcatggctcaggacgaacgctggcggcgtgcctaatacatgcaagtagaacgctgaagactttagcttgctaaagttggaagagttgcgaacgggtgagtaacgcgtaggtaacctgcctactagcgggggataactattggaaacgatagctaataccgcataacagcatttaacacatgttagatgcttgaaaggagcaattgcttcactagta

SEQ ID NO: 4672 - DNA, 225 bp, Unknown; identical to SEQ ID NO: 4662
  bacterial strain Ascusb_1179A encodes 16S rRNA

SEQ ID NO: 4673 - DNA, 225 bp, Unknown; identical to SEQ ID NO: 4662
  bacterial strain Ascusb_16442A encodes 16S rRNA

SEQ ID NO: 4674 - DNA, 225 bp, Unknown
  bacterial strain Ascusb_9920A encodes 16S rRNA
agagtttgatcatggctcagattgaacgctggcggcaggcctaacacatgcaagtcgagcggtaacacagggagcttgctcctgggtgacgagcggcggacgggtgagtaatgtctgggaaactgcctgatggagggggataactactggaaacggtagctaataccgcataatgtcgcaagaccaaagtgggggaccttcgggcctcatgccatcagatgtgcc

SEQ ID NO: 4675 - DNA, 225 bp, Unknown
  bacterial strain Ascusb_831A encodes 16S rRNA
agagtttgatcctggctcaggatgaacgctagcgataggcctaacacatgcaagtcgaggggcatcacatgaagtagcaatacggatggtggcgaccggcgcacgggtgagtaacacgtatgcaacctgccttcaacaaggggataacccgttgaaagacggactaataccctataacacaggggtcccgcatgggaatatttgttaaaggacaaccggttgaag

SEQ ID NO: 4676 - DNA, 225 bp, Unknown; identical to SEQ ID NO: 4674
  bacterial strain Ascusb_10378A encodes 16S rRNA

SEQ ID NO: 4677 - DNA, 225 bp, Unknown
  bacterial strain Ascusb_18453A encodes 16S rRNA
agagtttgatcatggctcaggacgaacgctggcggcgtgcttaacacatgcaagtcgagcgatgaagcttccttcgggaagtggattagcggcggacgggtgagtaacacgtgggtaacctgcctcaaagtgggggatagccttccgaaaggaagattaataccgcataatatgagagaatcgcatgatttttttatcaaagatttattgctttgagatggaccc

SEQ ID NO: 4678 - DNA, 225 bp, Unknown
  bacterial strain Ascusb_7360A encodes 16S rRNA
agagtttgatcctggctcagattgaacgctggcggcaggcctaacacatgcaagtcgaacggtaacaggaagcagcttgctgcttcgctgacgagtggcggacgggtgagtaatgtctgggaaactgcccgatggagggggataactactggaaacggtagctaataccgcataatgtcgcaagaccaaagagggggaccttcgggcctcttgccatcggatgtg

SEQ ID NO: 4679 - DNA, 225 bp, Unknown; identical to SEQ ID NO: 4678
  bacterial strain Ascusb_15382A encodes 16S rRNA

SEQ ID NO: 4680 - DNA, 225 bp, Unknown; identical to SEQ ID NO: 4260
  bacterial strain Ascusb_2895A encodes 16S rRNA

SEQ ID NO: 4681 - DNA, 225 bp, Unknown
  bacterial strain Ascusb_1147A encodes 16S rRNA
agagtttgatcatggctcaggatgaacgctggcggcgcgcctaatacatgcaagtcgaacgggaggtagcaatacctctagtggcgaacgggtgagtaacacgttgggaatctaccccctagaccgggatacccagtcgaaagattggctaataccggatatgatgcatttacacaagtagatgtattgaaagggagctttcaagcttcgcttagggatgaacct

SEQ ID NO: 4682 - DNA, 225 bp, Unknown; identical to SEQ ID NO: 4681
  bacterial strain Ascusb_2965A encodes 16S rRNA

SEQ ID NO: 4683 - DNA, 225 bp, Unknown
  bacterial strain Ascusb_4492B encodes 16S rRNA
agagtttgatcatggctcaggacgaacgctggcggcgtgcctaacacatgcaagtcgagcgaagtttttaaagaagatttcttcggaatgaaactttaattatcttagcggcggacgggtgagtaacgcgtgagaaacctgccttttacaaagggatagcctcgggaaactgggattaataccttatgacacttaaatgtcgcatgagatttaagtcaaagcgta

SEQ ID NO: 4684 - DNA, 225 bp, Unknown; identical to SEQ ID NO: 4683
  bacterial strain Ascusb_2612A encodes 16S rRNA

SEQ ID NO: 4685 - DNA, 225 bp, Unknown; identical to SEQ ID NO: 4683
  bacterial strain Ascusb_363A encodes 16S rRNA

SEQ ID NO: 4686 - DNA, 225 bp, Unknown; identical to SEQ ID NO: 4605
  bacterial strain Ascusb_168A encodes 16S rRNA

SEQ ID NO: 4687 - DNA, 225 bp, Unknown
  bacterial strain Ascusb_3123A encodes 16S rRNA
agagtttgatcatggctcaggacgaacgctggcggcgtgcctaatacatgcaagtagaacgctgaagactttagcttgctaaagttggaagagttgcgaacgggtgagtaacgcgtaggtaacctaccttctagcgggggataactattggaaacgatagctaataccgcataacagtttttaacacatgttagaaatttgaaaggagcaattgcttcactagga

SEQ ID NO: 4688 - DNA, 225 bp, Unknown
  bacterial strain Ascusb_375A encodes 16S rRNA
agagtttgatcatggctcaggacgaacgctggcggcgtgcttaacacatgcaagtcgaacgagacggattgaaagcttgcttttgaaatgtcgagtggcaaacgggtgagtaacgcgtagacaacctgccgcaaagatggggacaacagtccgaaaggactgctaataccgaatgttgtcaagcttccgcatgggagtttgattaaagatggcctctacttgtaa

SEQ ID NO: 4689 - DNA, 225 bp, Unknown
  bacterial strain Ascusb_3758A encodes 16S rRNA
agagtttgatcctggctcaggatgaacgctagctacaggcttaacacatgcaagtcgaggggaaacgatattgaaagcttgctttctttaggcgtcgaccggcgaatgggtgagtaacgcgtatccaacctgcccctgagtaagggatagcccatcgaaagatggattaataccttatggtttcctttgaagacatctgattaggaataaagatttatcgctgag

SEQ ID NO: 4690 - DNA, 225 bp, Unknown
  bacterial strain Ascusb_5136A encodes 16S rRNA
agagtttgatcctggctcaggatgaacgctagcgataggcctaacacatgcaagtcgaggggcagcattgaaatagcttgctattttagatggcgaccggcgcacgggtgagtaacacgtatgcaacctacctacaacagggaaataacccggcgaaagtcggactaatgtcctataaaacaggggtcccgcatgggaatatttgttaaagattttatcggttgt

SEQ ID NO: 4691 - DNA, 225 bp, Unknown
  bacterial strain Ascusb_2432A encodes 16S rRNA
agagtttgatcctggctcaggatgaacgctggcggcgtgcctaatacatgcaagtcgaacgagaagtcctcggacttcgagtggcgaacgggtgagtaacacgtattcaatctgccctaacgactgggataccctcgggaaaccttggctaataccggataggaattttgatcgcatgatcgaaattttaaaggatcttttgattcacgataggatgagaatgcg

SEQ ID NO: 4692 - DNA, 225 bp, Unknown
  bacterial strain Ascusb_120A encodes 16S rRNA
agagtttgatcatggctcaggacgaacgctggcggcgtgcttaacacatgcaagtcgaacggagaacttatttcggtaagttcttagtggcgaacgggtgagtaacgcgtaggcaacctgccctccagttggggacaacattccgaaagggatgctaataccgaatacgatggatttcccgcatgaggaatccatgaaaggcgctttcgggcgtcgctggaagat

SEQ ID NO: 4693 - DNA, 225 bp, Unknown
  bacterial strain Ascusb_1150A encodes 16S rRNA
agagtttgatcctggctcaggatgaacgctggcggcgtgcttaacacatgcaagtcgaacgagacttaaatgatttcttcggattgactttaagtcgagtggcggacgggtgagtaacgcgtggggaacctgccccataccgggggataacagttggaaacggctgctaataccgcatatgcgcacgaagaggcatctctttgtgtggaaaactccggtggtatg

SEQ ID NO: 4694 - DNA, 225 bp, Unknown
  bacterial strain Ascusb_21A encodes 16S rRNA
agagtttgatcatggctcaggatgaacgctggcggcgtgcctaacacatgcaagtcgagcgatttacttcggtaaagagcggcggacgggtgagtaacgcgtgggtaacctgcctcatacacatggataacataccgaaaggtatgctaatacaggataatataagagattcacatggatttcttatcaaagctccggcggtatgagatggacccgcgtctgatt

SEQ ID NO: 4695 - DNA, 225 bp, Unknown; identical to SEQ ID NO: 4694
  bacterial strain Ascusb_17947A encodes 16S rRNA

SEQ ID NO: 4696 - DNA, 225 bp, Unknown
  bacterial strain Ascusb_1079A encodes 16S rRNA
agagtttgatcatggctcaggatgaacgctggcggcgtgcctaacacatgcaagtcgagcgagaaatttaagaacaaagcttcggtggagtgattaaatggaaagcggcggacgggtgagtaacgcgtaggcaacctgccccttacagagggatagcctcgggaaaccgggattaaaacctcataaagcgagaagaccacatgggcttttcgccaaagatttatc

SEQ ID NO: 4697 - DNA, 225 bp, Unknown
  bacterial strain Ascusb_3851A encodes 16S rRNA
agagtttgatcctggctcaggacgaacgctggcggcgcgcctaacacatgcaagtcgaacggaactgttcggatgaagttttcggatggatgaagaacagtttagtggcggacgggtgagtaacacgtgagcaacctgcctttcagaggggaataacattcggaaacgaatgctaataccgcataatgcaacgagatggcatcatcttgctgccaaagatttatc

SEQ ID NO: 4698 - DNA, 225 bp, Unknown
  bacterial strain Ascusb_1344A encodes 16S rRNA
agagtttgatcctggctcaggacgaacgctggcggcgtgcctaacacatgcaagtcgagcgagatgagcccttcggggtgaatctagcggcggacgggtgagtaacacgtgggtaacctgcctcaaagagggggatagccctccgaaaggaggattaataccgcataaagttggtagttcgcatgaacaaccaaccaaaggagcaatccgctttgagatggaccc

SEQ ID NO: 4699 - DNA, 225 bp, Unknown; identical to SEQ ID NO: 4574
  bacterial strain Ascusb_2886A encodes 16S rRNA

SEQ ID NO: 4700 - DNA, 225 bp, Unknown
  bacterial strain Ascusb_379A encodes 16S rRNA
agagtttgatcctggctcaggatgaacgctagctacaggcttaacacatgcaagtcgaggggaaacgatattggaagcttgcttccgataggcgtcgaccggcgcacgggtgagtaacgcgtatccaacctgcccgtcacttgggaataaccttgcgaaagtaagactaatgcccaatgacatttatagaaggcatctgaaatgaattaaagatttatcggtgat

SEQ ID NO: 4701 - DNA, 225 bp, Unknown; identical to SEQ ID NO: 3662
  bacterial strain Ascusb_2179A encodes 16S rRNA

SEQ ID NO: 4702 - DNA, 225 bp, Unknown; identical to SEQ ID NO: 4414
  bacterial strain Ascusb_1068A encodes 16S rRNA

SEQ ID NO: 4703 - DNA, 225 bp, Unknown
  bacterial strain Ascusb_896A encodes 16S rRNA
agagtttgatcatggctcaggacgaacgctggcggcgtgcctaatacatgcaagtcgaacgagaagtcttcggacttcgagtggcgaacgggtgagtaacacgtattcaatctgccctaacgactgggataccctcgggaaaccttggctaataccggataggaattttgatcgcatgatcgaaattttaaaggatcttttgattcacgataggatgagaatgcg

SEQ ID NO: 4704 - DNA, 225 bp, Unknown; identical to SEQ ID NO: 4280
  bacterial strain Ascusb_301A encodes 16S rRNA

SEQ ID NO: 4705 - DNA, 225 bp, Unknown
  bacterial strain Ascusb_15140A encodes 16S rRNA
agagtttgatcatggctcaggatgaacgctagctacaggcttaacacatgcaagtcgaggggaaacgatattgaaagcttgctttctttaggcgtcgaccggcgaatgggtgagtaacgcgtatccaacctacccctgagtaagggatagcccatcgaaagatggattaataccttatggtttcctttgaaggcatcggattaggaataaagatttatcgctgag

SEQ ID NO: 4706 - DNA, 225 bp, Unknown; identical to SEQ ID NO: 4705
  bacterial strain Ascusb_16891A encodes 16S rRNA

SEQ ID NO: 4707 - DNA, 225 bp, Unknown
  bacterial strain Ascusb_4162A encodes 16S rRNA
agagtttgatcctggctcaggacgaacgctggcggcgtgcctaacacatgcaagtcgagcgaagttttcaaagcagatttcttcggaatgaagctttgattatcttagcggcggacgggtgagtaacgcgtgagaaacctgcctttcacaaagggatagcctcgggaaactgggattaataccttatgacacttaagagtcgcatgacttttaagtcaaagcgta

SEQ ID NO: 4708 - DNA, 225 bp, Unknown
  bacterial strain Ascusb_2541A encodes 16S rRNA
agagtttgatcctggctcaggacgaacgctggcggcgtgcctaatacatgcaagtagaacgctgaagactttagcttgctagagttggaagagttgcgaacgggtgagtaacgcgtaggtaacctgcctactagcgggggataactattggaaacgatagctaataccgcataatagtatttaacacatgttagagacttgaaagatgcaattgcatcactagta

SEQ ID NO: 4709 - DNA, 225 bp, Unknown; identical to SEQ ID NO: 4694
  bacterial strain Ascusb_445A encodes 16S rRNA

SEQ ID NO: 4710 - DNA, 225 bp, Unknown; identical to SEQ ID NO: 2522
  bacterial strain Ascusb_2860A encodes 16S rRNA

SEQ ID NO: 4711 - DNA, 225 bp, Unknown; identical to SEQ ID NO: 2522
  bacterial strain Ascusb_4385A encodes 16S rRNA

SEQ ID NO: 4712 - DNA, 225 bp, Unknown
  bacterial strain Ascusb_4740A encodes 16S rRNA
agagtttgatcatggctcaggacgaacgctggcggcgtgcctaacacatgcaagtcgagcgatgaagttccttcgggaatggattagcggcggacgggtgagtaacacgtgggcaacctgcctcaaagtgggggatagccctccgaaaggaggattaataccgcataatgttaagtttttgcataaaagcttaaccaaaggagtaatccgctttgagatgggccc

SEQ ID NO: 4713 - DNA, 225 bp, Unknown
  bacterial strain Ascusb_649A encodes 16S rRNA
agagtttgatcatggctcaggatgaacgctagctacaggcttaacacatgcaagtcgaggggcagcatgaaggaagcttgcttcctttgatggcgaccggcgcacgggtgagtaacgcgtatccaacctgcccattacactgggatagcccgccgaaaggcgaattaatcccggatagtgttcttagatggcatcagacaaggactaaaggtttttccggtaatg

SEQ ID NO: 4714 - DNA, 225 bp, Unknown; identical to SEQ ID NO: 3974
  bacterial strain Ascusb_4058A encodes 16S rRNA

SEQ ID NO: 4715 - DNA, 225 bp, Unknown
  bacterial strain Ascusb_3805A encodes 16S rRNA
agagtttgatcctggctcaggataaacgctggcggcgtgcctaatacatgcaagtcgatcggagagtttcaagcttgcttgagactttcagaggcgaacgggtgagtaatacataagcaacctgcccacgaagaccgggataacatctggaaacgggtactaaaaccggataggtaatagaaccgcatggttcgattattaaaggagagaaacactggtggatgg

SEQ ID NO: 4716 - DNA, 225 bp, Unknown
  bacterial strain Ascusb_514A encodes 16S rRNA
agagtttgatcctggctcaggatgaacgctggcggcgtgcctaacacatgcaagtcgaacgagcgagagatgaaacctagtgattctcgagcgagtggcggacgggtgagtaacgcgtgggtaacctgccttacagagggggataacagtttgaaaagactgctaataccgcataagcacacagtaccgcatggtacagggtgaaaagatctatcgctgtaagat

SEQ ID NO: 4717 - DNA, 225 bp, Unknown; identical to SEQ ID NO: 4490
  bacterial strain Ascusb_1953A encodes 16S rRNA

SEQ ID NO: 4718 - DNA, 225 bp, Unknown; identical to SEQ ID NO: 4463
  bacterial strain Ascusb_1959A encodes 16S rRNA

SEQ ID NO: 4719 - DNA, 225 bp, Unknown
  bacterial strain Ascusb_3898A encodes 16S rRNA
agagtttgatcctggctcaggacgaacgctggcggcgtgcttaacacatgcaagtcgaacgaggtgattgaaagcttgcttttgagaaccgagtggcaaacgggtgagtaacgcgtagacaacctgccgcaaagatggggacaacagtccgaaaggactgctaataccgaatgttgtcagattcccgcatgggagactgattaaagatggcctctacttgtaagc

SEQ ID NO: 4720 - DNA, 225 bp, Unknown; identical to SEQ ID NO: 4591
  bacterial strain Ascusb_375B encodes 16S rRNA

SEQ ID NO: 4721 - DNA, 225 bp, Unknown
  bacterial strain Ascusb_434A encodes 16S rRNA
agagtttgatcctggctcaggatgaacgctggcggcgtgcctaacacatgcaagtcgaacgagcgagagatgaaacctagtgaatctcgagcgagtggcggacgggtgagtaacgcgtgggtaacctgccttacagagggggataacagtttgaaaagactgctaataccgcataagcacacagtaccgcatggtacagggtgaaaagatttatcactgtaagat

SEQ ID NO: 4722 - DNA, 225 bp, Unknown; identical to SEQ ID NO: 4721
  bacterial strain Ascusb_1135A encodes 16S rRNA

SEQ ID NO: 4723 - DNA, 225 bp, Unknown; identical to SEQ ID NO: 2103
  bacterial strain Ascusb_1834A encodes 16S rRNA

SEQ ID NO: 4724 - DNA, 225 bp, Unknown
  bacterial strain Ascusb_2594B encodes 16S rRNA
agagtttgatcatggctcaggatgaacgctggcggcgtgcctaatacatgcaagtcgatcgggagtagcaatacttcagaggcgtacgggtgagtaacacatagggaacctgccctttagcttgggatacccagacgaaagtttggctaataccggataacaacagcagacgcatgtttgctgtttgaaaggcgctttcaagcgtcactattggatggacctgtg

SEQ ID NO: 4725 - DNA, 225 bp, Unknown
  bacterial strain Ascusb_4126A encodes 16S rRNA
agagtttgatcctggctcaggacgaacgctggcggcgtgcctaatacatgcaagtcgaacgaaactttcttacaccgaatgcttgcattcaccgtaagaagttgagtggcggacgggtgagtaacacgtgggtaacctgcctaaaagaaggggataacacttggaaacaggtgctaataccgtatatctctaaggatcgcatgatccttagacgaaagatggttc

SEQ ID NO: 4726 - DNA, 225 bp, Unknown
  bacterial strain Ascusb_310A encodes 16S rRNA
agagtttgatcctggctcaggacgaacgctggcggcgtgcctaacacatgcaagtcgaacggggattttgtttcggcagaatcctagtggcgaacgggtgagtaacgcgtaggcaacctgccctccagacggggacaacattccgaaaggggtgctaataccggatacgaaggagccatcgcatggtggttctttgaaagatggcctctacatgtaagctatcgc

SEQ ID NO: 4727 - DNA, 225 bp, Unknown; identical to SEQ ID NO: 4726
  bacterial strain Ascusb_211B encodes 16S rRNA

SEQ ID NO: 4728 - DNA, 225 bp, Unknown; identical to SEQ ID NO: 2583
  bacterial strain Ascusb_3385A encodes 16S rRNA

SEQ ID NO: 4729 - DNA, 225 bp, Unknown
  bacterial strain Ascusb_20566B encodes 16S rRNA
agagtttgatcatggctcaggatgaacgctggcggcgtgcctaacacatgcaagtcgagcgatctcttcggagagagcggcggacgggtgagtaacgcgtgggtaacctgccctgtacacacggataacataccgaaaggtatactaatacgggataacatataaaagtcgcatggcttttgtatcaaagctccggcggtacaggatggacccgcgtctgattag

SEQ ID NO: 4730 - DNA, 225 bp, Unknown
  bacterial strain Ascusb_888A encodes 16S rRNA
agagtttgatcatggctcaggattaacgctggcggcatgcctaatacatgcaagtcgaatgggtagcttgctatccatggcgaacgggtgagtaacacgtaggtaacctgtctttaagacgaggataacctttggaaacgaaggataatactggataggtcgttataaatcacatgattaaacgattaaagattattatgtcacttagagaggggcctgcggcgc

SEQ ID NO: 4731 - DNA, 225 bp, Unknown; identical to SEQ ID NO: 4121
  bacterial strain Ascusb_2987B encodes 16S rRNA

SEQ ID NO: 4732 - DNA, 225 bp, Unknown; identical to SEQ ID NO: 4121
  bacterial strain Ascusb_2835A encodes 16S rRNA

SEQ ID NO: 4733 - DNA, 225 bp, Unknown
  bacterial strain Ascusb_1731A encodes 16S rRNA
agagtttgatcatggctcagattgaacgctggcggcaggcctaacacatgcaagtcgagcggtaacacagagagcttgctctcgggtgacgagcggcggacgggtgagtaatgtctgggaaactgcctgatggagggggataactactggaaacggtagctaataccgcataacgtcgcaagaccaaagtgggggaccttcgggcctcatgccatcagatgtgcc

SEQ ID NO: 4734 - DNA, 225 bp, Unknown
  bacterial strain Ascusb_1889B encodes 16S rRNA
agagtttgatcatggctcaggacgaacgctggcggcgtgcttaacacatgcaagtcgaacgggaagaaaagaaagagcttgctcttttttggattctagtggcaaacgggtgagtaacacgtaaacaacctgccttcaggatggggacaacagacggaaacgactgctaataccgaataccttccaatttccgcatggagatgggaagaaagggtggcctctact

SEQ ID NO: 4735 - DNA, 225 bp, Unknown; identical to SEQ ID NO: 4734
  bacterial strain Ascusb_1829A encodes 16S rRNA

SEQ ID NO: 4736 - DNA, 225 bp, Unknown; identical to SEQ ID NO: 4734
  bacterial strain Ascusb_2744A encodes 16S rRNA

SEQ ID NO: 4737 - DNA, 225 bp, Unknown
  bacterial strain Ascusb_1366B encodes 16S rRNA
agagtttgatcatggctcaggacgaacgctggcggcgtgcctaatacatgcaagtcgagcggagttgatggagtgcttgcactcctgatgcttagcggcggacgggtgagtaatacgtaggtaacctgcccttaagaccgggataactcacggaaacgtgggctaataccggataggcgatttcctcgcatgaggggatcgggaaaggcggagcaatctgccgct

SEQ ID NO: 4738 - DNA, 225 bp, Unknown
  bacterial strain Ascusb_2205A encodes 16S rRNA
agagtttgatcatggctcaggacgaacgctggcggcgtgcctaacacatgcaagtcgagcggagaaagttcttcggaactttctcagcggcggacgggtgagtaacacgtgggtaacctgccttatagagggggatagccttccgaaaggaagattaataccgcataacatttttgtttcgcatgaaataaaaatcaaaggagcaatccgctataagatggaccc

SEQ ID NO: 4739 - DNA, 225 bp, Unknown
  bacterial strain Ascusb_352A encodes 16S rRNA
agagtttgatcctggctcaggacgaacgctggcggcatgcctaacacatgcaagtcgaacgaagtaagagagaagcttgcttagctcttacttagtggcggacgggtgagtaacgcgtgagtaacctgcctttcagagggggataacgttctgaaaagaacgctaataccgcatgatatattggggtcgcatggccttggtatcaaaggagcaatccgctgaaag

SEQ ID NO: 4740 - DNA, 225 bp, Unknown
  bacterial strain Ascusb_1018A encodes 16S rRNA
agagtttgatcctggctcaggacgaacgctggcggcgtgcttaacacatgcaagtcgagcgagattttaagaattagtttactaattcttgaatgacagcggcggacgggtgagtaacgcgtgggcaacctgccttgtggaaagggatagcctcgggaaaccgggattaataccttataatatttacttttcgcatgagaagtaaatcaaagatttatcgccaca

SEQ ID NO: 4741 - DNA, 225 bp, Unknown
  bacterial strain Ascusb_2776A encodes 16S rRNA
agagtttgatcatggctcaggacgaacgctggcggcgtgcttaacacatgcaagtcgaacggggcgatttaaaagcttgcttttgatgagcctagtggcaaacgggtgagtaacgcgtaggcaacctgccctcaggatggggacaacggcccgaaaggaccgctaataccgaatgaagtgtcggaatcgcatgatactgataccaaaggcggagcaatccgtcac

SEQ ID NO: 4742 - DNA, 225 bp, Unknown
  bacterial strain Ascusb_2606B encodes 16S rRNA
agagtttgatcctggctcaggatgaacgctggcggcgtgcttaacacatgcaagtcgagcgaagcgcagaaacggatttcttcggattgaaggttctgtgactgagcggcggacgggtgagtaacgcgtggggaacctgccctgtaccgggggataacagacagaaatgtctgctaataccgcataagcgcacgagaaggcatcttcttgtgtgaaaaactccgg

SEQ ID NO: 4743 - DNA, 214 bp, Unknown
  bacterial strain Ascusb_1150B encodes 16S rRNA
agagtttgatcctggctcaggatgaacgctagcggcaggcttaacacatgcaagtcgaggggcatcgcggggtagcaataccctggcggcgaccggcgaaagggtgcgtaacgcgtgagcgacatgcccgtcacagggggataaccggcggaaacgccgcctaataccccatatgaggccaggccacatggccgggccttgaaagtcaaggcgg

SEQ ID NO: 4744 - DNA, 225 bp, Unknown
  bacterial strain Ascusb_287A encodes 16S rRNA
agagtttgatcctggctcaggatgaacgctggcggcgtgcctaatacatgcaagtcgaacgaggtgtagcaatacaccgagtggcgaacgggtgagtaacacgtaggtaacctgcccctaagtctgggatacccaggggaaaccttggctaataccggatagcggcggaggggacatcccttccgcacgaaagtcgcgtttgcgacgctttcggatggacctgcg

SEQ ID NO: 4745 - DNA, 225 bp, Unknown
  bacterial strain Ascusb_301B encodes 16S rRNA
agagtttgatcatggctcaggacgaacgctggcggcatgcctaacacatgcaagtcgaacggagtaagagagaagcttgcttagctcttacttagtggcggacgggtgagtaacgcgtgagtaacctgcctttcagagggggataacgttctgaaaagaacgctaataccgcatgatatattggggtcgcatggccttggtatcaaaggagcaatccgctgaaag

SEQ ID NO: 4746 - DNA, 225 bp, Unknown
  bacterial strain Ascusb_4975A encodes 16S rRNA
agagtttgatcctggctcaggacgaacgctggcggcgtgcttaacacatgcaagtcgaacgagacggattgaaagcttgcttttgaaaagtcgagtggcaaacgggtgagtaacgcgtagacaacctgccgcaaagatggggacaacagtccgaaaggactgctaataccgaatgttgtgcaacttccgcatgggagatgcattaaagatggcctctacttgtaa

SEQ ID NO: 4747 - DNA, 225 bp, Unknown
  bacterial strain Ascusb_4846A encodes 16S rRNA
agagtttgatcctggctcaggatgaacgctagctacaggcttaacacatgcaagtcgaggggaaacgacatagagtgcttgcactttatgggcgtcgaccggcgaatgggtgagtaacgcgtatccaacctgcccttgactgagggatagcccagtgaaaactgaattaatacctcatatcctcctccgacggcatcagacgaggagtaaagatttatcggtcaa

SEQ ID NO: 4748 - DNA, 225 bp, Unknown; identical to SEQ ID NO: 4569
  bacterial strain Ascusb_1929A encodes 16S rRNA

SEQ ID NO: 4749 - DNA, 225 bp, Unknown
  bacterial strain Ascusb_2866A encodes 16S rRNA
agagtttgatcctggctcaggacgaacgctggcggcgtgcttaacacatgcaagtcgaacgaggcagattttcaacactgaatgcttgaaggcgatgctttcgagcgtcgtgatggcgaagccatcaccacacttatataaagtgattaacataagtgatgggtggtcgagcattgagtgttgaaaagatgccgagtggcaaacgggtgagtaacgcgtagacaa

SEQ ID NO: 4750 - DNA, 225 bp, Unknown
  bacterial strain Ascusb_489B encodes 16S rRNA
agagtttgatcctggctcaggacgaacgctggcggcgtgcttaacacatgcaagtcgaacgagaagggatgagaagcttgcttcttatcaattcgagtggcaaacgggtgagtaacgcgtaagcaacctgcccttcagatggggacaacagctggaaacggctgctaataccgaatacgttctttttgtcgcatggcagagagaagaaagggaggctcttcggag

SEQ ID NO: 4751 - DNA, 225 bp, Unknown
  bacterial strain Ascusb_3250A encodes 16S rRNA
agagtttgatcctggctcaggacgaacgctggcggcgtgcttaacacatgcaagtcgaacgagacggatagaagcttgcttttagaagtcgagtggcaaacgggtgagtaacgcgtagacaacctgcctctgggatggggacaacagcccgaaagggctgctaataccgaatgaaatggtttcttctcctgaagttatcatgaaagatggcctctatttataagc

SEQ ID NO: 4752 - DNA, 225 bp, Unknown; identical to SEQ ID NO: 4751
  bacterial strain Ascusb_19138A encodes 16S rRNA

SEQ ID NO: 4753 - DNA, 225 bp, Unknown; identical to SEQ ID NO: 4751
  bacterial strain Ascusb_300B encodes 16S rRNA

SEQ ID NO: 4754 - DNA, 225 bp, Unknown
  bacterial strain Ascusb_2895B encodes 16S rRNA
agagtttgatcctggctcaggacgaacgctggcggcgtgcctaatacatgcaagtcgagcgatatctttgggggcttgcccccgaagatgtagcggcggacgggtgagtaacacgtgggcaacctgcctgtaagactgggataacttcgggaaaccggagctaataccggataactcaagaaaccacatggtttcttgctaaaagatggctccggctatcactta

SEQ ID NO: 4755 - DNA, 225 bp, Unknown; identical to SEQ ID NO: 2965
  bacterial strain Ascusb_3533A encodes 16S rRNA

SEQ ID NO: 4756 - DNA, 225 bp, Unknown
  bacterial strain Ascusb_8024C encodes 16S rRNA
agagtttgatcctggctcaggacgaacgctggcggcgtgcctaatacatgcaagtcgagcgatatctttgggggcttgcccccgaagatgtagcggcggacgggtgagtaacacgtgggcaacctgcctgtaagactgggataacttcgggaaaccggagctaataccggataactcaagaaaccacatggtttcttgctaaaagatggctccagctatcactta

SEQ ID NO: 4757 - DNA, 225 bp, Unknown
  bacterial strain Ascusb_2440A encodes 16S rRNA
agagtttgatcatggctcaggacgaacgctggcggcgtgcttaacacatgcaagtcgagcgatgaagttccttcgggaacggattagcggcggacgggtgagtaacacgtgggtaacctgcctcatagaggggaatagcctttcgaaaggaagattaataccgcataagattgtagtttcgcatgaaacagcaattaaaggagtaatccactatgagatggaccc

SEQ ID NO: 4758 - DNA, 225 bp, Unknown; identical to SEQ ID NO: 3486
  bacterial strain Ascusb_6714A encodes 16S rRNA

SEQ ID NO: 4759 - DNA, 225 bp, Unknown
  bacterial strain Ascusb_1059A encodes 16S rRNA
agagtttgatcatggctcaggatgaacgccggcggtgtgcctaatacatgcaagtcgaacgcgttggcccaattgattgatggtgctttcacctgattgattttggttgccaacgagtggcggacgggtgagtaacacgtaggtaacctgcccagaagcgggggacaacatttggaaacagatgctaataccgcataacagcgttgttcgcatgaacaacgctta

SEQ ID NO: 4760 - DNA, 225 bp, Unknown
  bacterial strain Ascusb_3342A encodes 16S rRNA
agagtttgatcatggctcagattgaacgctggcggcaggcctaacacatgcaagtcgagcggcagcggaaagtagcttgctactttgccggcgagcggcggacgggtgagtaatgtctgggaaactgcctgatggagggggataactactggaaacggtagctaataccgcataatgtcgcaagaccaaagagggggaccttcgggcctcttgccatcagatgtg

SEQ ID NO: 4761 - DNA, 225 bp, Unknown; identical to SEQ ID NO: 4759
  bacterial strain Ascusb_1107A encodes 16S rRNA

SEQ ID NO: 4762 - DNA, 225 bp, Unknown; identical to SEQ ID NO: 4591
  bacterial strain Ascusb_3810A encodes 16S rRNA

SEQ ID NO: 4763 - DNA, 225 bp, Unknown
  bacterial strain Ascusb_2736A encodes 16S rRNA
agagtttgatcatggctcaggacgaacgctggcggcgtgcttaacacatgcaagtcgagcgggaaacttcggtttccagcggcggacgggtgagtaacacgtgggcaacctgcctcacaataggggatagccctccgaaaggaggattaataccctataacacaaagaaaacgcatgttttctttgccaaagaatttcgttgtgagatgggcccgcggcgcatta

SEQ ID NO: 4764 - DNA, 225 bp, Unknown; identical to SEQ ID NO: 608
  bacterial strain Ascusb_8863A encodes 16S rRNA

SEQ ID NO: 4765 - DNA, 225 bp, Unknown; identical to SEQ ID NO: 608
  bacterial strain Ascusb_1924A encodes 16S rRNA

SEQ ID NO: 4766 - DNA, 225 bp, Unknown; identical to SEQ ID NO: 608
  bacterial strain Ascusb_1189A encodes 16S rRNA

SEQ ID NO: 4767 - DNA, 225 bp, Unknown; identical to SEQ ID NO: 608
  bacterial strain Ascusb_2725A encodes 16S rRNA

SEQ ID NO: 4768 - DNA, 225 bp, Unknown
  bacterial strain Ascusb_197A encodes 16S rRNA
agagtttgatcctggctcaggacgaacgctggcggcgtgcttaacacatgcaagtcgaacgagacgattgaaagcttgcttttgagagtcgagtggcaaacgggtgagtaacgcgtagacaacctgccgcaaagatggggacaacagtccgaaaggactgctaataccgaatgttgtatcgtttccgcatggagatgatattaaagatggcctctacttgtaagc

SEQ ID NO: 4769 - DNA, 225 bp, Unknown; identical to SEQ ID NO: 4768
  bacterial strain Ascusb_4663A encodes 16S rRNA

SEQ ID NO: 4770 - DNA, 225 bp, Unknown; identical to SEQ ID NO: 4768
  bacterial strain Ascusb_6110A encodes 16S rRNA

SEQ ID NO: 4771 - DNA, 214 bp, Unknown
  bacterial strain Ascusb_154A encodes 16S rRNA
agagtttgatcctggctcaggatgaacgctagcggcaggcttaacacatgcaagtcgaggggcatcgcggggtagcaataccctggcggcgaccggcgaaagggtgcgtaacgcgtgagcgacatgcccgtcacagggggataaccggcggaaacgccgcctaataccccatatgaggccaggccacatggctgggtcttgaaagtcaaggcgg

SEQ ID NO: 4772 - DNA, 225 bp, Unknown; identical to SEQ ID NO: 4463
  bacterial strain Ascusb_13706A encodes 16S rRNA

SEQ ID NO: 4773 - DNA, 225 bp, Unknown
  bacterial strain Ascusb_631A encodes 16S rRNA
agagtttgatcctggctcaggatgaacgctagctacaggcttaacacatgcaagtcgaggggcagcatgatcaaagcttgctttgattgatggcgaccggcgcacgggtgagtaacgcgtatccaaccttccctatagtagaggatagcccggcgaaagtcggattaatactctatgttttccaatgcagacatctaaaatggaacaaaggtttaccgctatagg

SEQ ID NO: 4774 - DNA, 225 bp, Unknown; identical to SEQ ID NO: 4716
  bacterial strain Ascusb_4119B encodes 16S rRNA

SEQ ID NO: 4775 - DNA, 225 bp, Unknown; identical to SEQ ID NO: 4773
  bacterial strain Ascusb_7475A encodes 16S rRNA

SEQ ID NO: 4776 - DNA, 225 bp, Unknown
  bacterial strain Ascusb_2817A encodes 16S rRNA
agagtttgatcatggctcaggatgaacgctagctacaggcttaacacatgcaagtcgaggggtaacgatatcgaaagcttgctttcgataggcgacgaccggcgcacgggtgagtaacgcgtatccaacctgcccataactaagggataatccgtagaaatgcggtctaataccttatgtgttccgatgaggacatctgaattggaataaagatttatcggttat

SEQ ID NO: 4777 - DNA, 225 bp, Unknown; identical to SEQ ID NO: 3486
  bacterial strain Ascusb_1368A encodes 16S rRNA

SEQ ID NO: 4778 - DNA, 225 bp, Unknown; identical to SEQ ID NO: 3486
  bacterial strain Ascusb_1332A encodes 16S rRNA

SEQ ID NO: 4779 - DNA, 225 bp, Unknown; identical to SEQ ID NO: 3486
  bacterial strain Ascusb_12394A encodes 16S rRNA

SEQ ID NO: 4780 - DNA, 225 bp, Unknown; identical to SEQ ID NO: 3486
  bacterial strain Ascusb_2017A encodes 16S rRNA

SEQ ID NO: 4781 - DNA, 225 bp, Unknown; identical to SEQ ID NO: 3486
  bacterial strain Ascusb_9039A encodes 16S rRNA

SEQ ID NO: 4782 - DNA, 225 bp, Unknown
  bacterial strain Ascusb_4081B encodes 16S rRNA
agagtttgatcatggctcaggacgaacgctggcggcgtgcctaatacatgcaagtagaacgctgaagactttagcttgctaaagttggaagagttgcgaacgggtgagtaacgcgtaggtaacctgcctactagcgggggataactactggaaacggtagctaataccgcataacgtcgcaagaccaaagtgggggaccttcgggcctcatgccatcagatgtgc

SEQ ID NO: 4783 - DNA, 225 bp, Unknown; identical to SEQ ID NO: 4782
  bacterial strain Ascusb_9033A encodes 16S rRNA

SEQ ID NO: 4784 - DNA, 225 bp, Unknown; identical to SEQ ID NO: 4782
  bacterial strain Ascusb_7414A encodes 16S rRNA

SEQ ID NO: 4785 - DNA, 225 bp, Unknown
  bacterial strain Ascusb_957B encodes 16S rRNA
agagtttgatcatggctcaggatgaacgctagctacaggcttaacacatgcaagtcgaggggcagcatgaagtttgcttgcaaactttgatggcgaccggcgcacgggtgagtaacgcgtatccaaccttccccttagtagggcatagcccggcgaaagtcggattaataccctatgttatccgaagatggcatctgagatggaataaagatttatcgcttatgg

SEQ ID NO: 4786 - DNA, 225 bp, Unknown; identical to SEQ ID NO: 4070
  bacterial strain Ascusb_1961B encodes 16S rRNA

SEQ ID NO: 4787 - DNA, 225 bp, Unknown
  bacterial strain Ascusb_552A encodes 16S rRNA
agagtttgatcatggctcaggatgaacgctagctacaggcttaacacatgcaagtcgaggggcagcattatcgaagcttgctttgatagatggcgaccggcgcacgggtgagtaacgcgtatccaaccttccccatagtagggcatagcccgtagaaatgcggattaataccctatgtattccgaggatgacatctgattcggaacaaaggttcaccgctatggg

SEQ ID NO: 4788 - DNA, 225 bp, Unknown
  bacterial strain Ascusb_11494B encodes 16S rRNA
agagtttgatcatggctcaggatgaacgctggcggcgtgcctaatacatgcaagtcgaacggagcaccttggtgctcagtggcgaacgggtgaggagaacataggtaacctgcccctccgagggggacaacagctggaaacggctgctaagaccgcatagacgcattcagggcatcctggatgcgctaaatgaccggatggtcagcggggggatggacctatgca

SEQ ID NO: 4789 - DNA, 225 bp, Unknown; identical to SEQ ID NO: 4788
  bacterial strain Ascusb_12803B encodes 16S rRNA

SEQ ID NO: 4790 - DNA, 225 bp, Unknown
  bacterial strain Ascusb_5156B encodes 16S rRNA
agagtttgatcctggctcagattgaacgctggcggcaggcttaacacatgcaagtcgaacggtagcgggaagaaagcttgctttctttgccgacgagtggcggacgggtgagtaatgcttggggatctggcttatggagggggataacgacgggaaactgtcgctaataccgcgtaatatctttggattaaagggtgggactttcgggccacctgccataagatg

SEQ ID NO: 4791 - DNA, 225 bp, Unknown
  bacterial strain Ascusb_5179B encodes 16S rRNA
agagtttgatcctggctcaggataaacgccggcggcgtgcctaatacatgcaagtcgaacgaggctcttcggagccgagtggcgtacgggtgagtaacgcgtaggtaacctgcctactagcgggggataactattggaaacgatagctaataccgcataacagcatttaacacatgttagatgcttgaaaggagcaattgcttcactagtagatggacctgcgtt

SEQ ID NO: 4792 - DNA, 225 bp, Unknown
  bacterial strain Ascusb_13706B encodes 16S rRNA
agagtttgatcctggctcaggatgaacgctggcggcgtgcttaacacatgcaagtcgaacgaagcaacttatcacgattccttcgggatgacgatttgttgactgagtggcggacgggtgagtaacgcgtgggtaacctgccttatacagggggatagcagctggaaacggctgataataccgcataagcgcacagcatcgcatgatgcagtgtgaaaaactccg

SEQ ID NO: 4793 - DNA, 225 bp, Unknown; identical to SEQ ID NO: 4792
  bacterial strain Ascusb_431A encodes 16S rRNA

SEQ ID NO: 4794 - DNA, 225 bp, Unknown
  bacterial strain Ascusb_624B encodes 16S rRNA
agagtttgatcctggctcagattgaacgctggcggcatgctttacacatgcaagtcgaacggcagcgcggggcaacctggcggcgagtggcgaacgggtgagtaatatatcggaacgtacccaagagtgggggataacgtagcgaaagttacgctaataccgcatacgatctaaggatgaaagcaggggatcttcggaccttgtgctcctggagcggccgatatc

SEQ ID NO: 4795 - DNA, 225 bp, Unknown
  bacterial strain Ascusb_4846B encodes 16S rRNA
agagtttgatcatggctcaggatgaacgctggcggcgtgcttaacacatgcaagtcgaacggagttacttgggagcttgctcttaagtaacttagtggcggacgggtgagtaacgcgtgggtaacctgccctatacagggggataacagttagaaatgactgctaacaccgcataacatcattttgttgcatgacagaatggtcaaatatttataggtataggat

SEQ ID NO: 4796 - DNA, 225 bp, Unknown
  bacterial strain Ascusb_2434B encodes 16S rRNA
agagtttgatcatggctcaggatgaacgctggcggcgtgcttaacacatgcaagtcgaacggggttattaccattgagatttcggtcgatttggttttaacttagtggcggacgggtgagtaacgcgtggggaacctgcctcaatccgggggataacattcggaaacggatgctaataccgtataagcgcacagagcggcatcgctccgtgtgaaaaactccggt

SEQ ID NO: 4797 - DNA, 225 bp, Unknown; identical to SEQ ID NO: 4796
  bacterial strain Ascusb_3663B encodes 16S rRNA

SEQ ID NO: 4798 - DNA, 225 bp, Unknown; identical to SEQ ID NO: 4490
  bacterial strain Ascusb_6751A encodes 16S rRNA

SEQ ID NO: 4799 - DNA, 225 bp, Unknown; identical to SEQ ID NO: 4490
  bacterial strain Ascusb_16970A encodes 16S rRNA

SEQ ID NO: 4800 - DNA, 225 bp, Unknown; identical to SEQ ID NO: 4490
  bacterial strain Ascusb_5611A encodes 16S rRNA

SEQ ID NO: 4801 - DNA, 225 bp, Unknown
  bacterial strain Ascusb_1224A encodes 16S rRNA
agagtttgatcctggctcaggacgaacgctggcggcgtgcctaatacatgcaagtagaacgctgaagactttagcttgctaaagttggaagagttgcgaacgggtgagtaatacctggggagctgcctgaatgagggggacaacacctggaaacgggtgctaataccgcgtaagccctgagggggaaaggccgggcaaccggtcgcattcagatgcgcccaggtg

SEQ ID NO: 4802 - DNA, 225 bp, Unknown; identical to SEQ ID NO: 164
  bacterial strain Ascusb_1372A encodes 16S rRNA

SEQ ID NO: 4803 - DNA, 225 bp, Unknown
  bacterial strain Ascusb_64B encodes 16S rRNA
agagtttgatcatggctcaggacgaacgctggcggcgtgcttaacacatgcaagtcgaacgagacggatagaagcttgcttttagaagtcgagtggcaaacgggtgagtaacgcgtagacaacctgcctctgggatggggacaacagcccgaaagggctgctaataccgaatgaaatggtttcttctcctgaagagatcatgaaagatggcctctaaattatgct

SEQ ID NO: 4804 - DNA, 225 bp, Unknown; identical to SEQ ID NO: 4256
  bacterial strain Ascusb_19281A encodes 16S rRNA

SEQ ID NO: 4805 - DNA, 225 bp, Unknown; identical to SEQ ID NO: 4773
  bacterial strain Ascusb_957A encodes 16S rRNA

SEQ ID NO: 4806 - DNA, 225 bp, Unknown
  bacterial strain Ascusb_1665A encodes 16S rRNA
agagtttgatcctggctcaggacgaacgctggcggcgtgcctaacacatgcaagtcgagcggagatgatctgaagtttactttgggtcgtcttagcggcggacgggtgagtaacgcgtgggcaacctgcctttcacagggggataacacagggaaacttgtgctaataccgcataacacagcgaggtagcattaccttgttgtcaaaggagcaatccggtgatag

SEQ ID NO: 4807 - DNA, 225 bp, Unknown
  bacterial strain Ascusb_761A encodes 16S rRNA
agagtttgatcatggctcaggacgaacgctggcggcgtgcctaacacatgcaagtcgagcggagaaagttcttcggaactttcttagcggcggacgggtgagtaacacgtgggtaacctgccttatagagggggatagccttccgaaaggaagattaataccgcataacattttcgtttcgcatgagatgaaaatcaaaggagcaatccgctataagatggaccc

SEQ ID NO: 4808 - DNA, 225 bp, Unknown; identical to SEQ ID NO: 4807
  bacterial strain Ascusb_2047A encodes 16S rRNA

SEQ ID NO: 4809 - DNA, 225 bp, Unknown
  bacterial strain Ascusb_4463A encodes 16S rRNA
agagtttgatcctggctcaggatgaacgctagctacaggcttaacacatgcaagtcgaggggcagcatgacgatagcttgctattgtcgatggcgaccggcgcacgggtgagtaacgcgtatccaacctgcccattactcaggtatagcccagtgaaaactggattaatccctgatgcggtctcgtgcagacatctaagcgagaccaaagttttcaacggtaatg

SEQ ID NO: 4810 - DNA, 225 bp, Unknown; identical to SEQ ID NO: 4502
  bacterial strain Ascusb_1119A encodes 16S rRNA

SEQ ID NO: 4811 - DNA, 225 bp, Unknown
  bacterial strain Ascusb_2137A encodes 16S rRNA
agagtttgatcctggctcaggatgaacgctagctacaggcttaacacatgcaagtcgaggggtaacatgaagaaagcttgctttctttgatgacgaccggcgcacgggtgagtatcgcgtatccaacctgcccataagtagggaatagccttgcgaaagtaagattaatgccctatggtttccgtcaaagacatctgagatggaataaagatttatcgcttatgg

SEQ ID NO: 4812 - DNA, 225 bp, Unknown
  bacterial strain Ascusb_8619A encodes 16S rRNA
agagtttgatcatggctcaggacgaacgctggcggcgtgcttaacacatgcaagtcgaacgaggcgattgaaagcttgcttttgaaagccgagtggcaaacgggtgagtaacgcgtagacaacctgccgcaaagatggggacaacagtccgaaaggactgctaataccgaatgttgtgcagcttccgcatggaggatgcattaaagatggcctctacttgtaagc

SEQ ID NO: 4813 - DNA, 225 bp, Unknown; identical to SEQ ID NO: 4569
  bacterial strain Ascusb_383B encodes 16S rRNA

SEQ ID NO: 4814 - DNA, 225 bp, Unknown
  bacterial strain Ascusb_341A encodes 16S rRNA
agagtttgatcatggctcaggatgaacgccggcggtgtgcctaatacatgcaagtcgaacgcgttggcccaactgattgaacgtgcttgcacggacttgatgttgatttaccagcgagtggcggacgggtgagtaacacgtaggtaacctgccccaaagcgggggataacatttggaaacagatgctaataccgcataacaatttgaatcgcatgattcaaattt

SEQ ID NO: 4815 - DNA, 225 bp, Unknown; identical to SEQ ID NO: 62
  bacterial strain Ascusb_15152A encodes 16S rRNA

SEQ ID NO: 4816 - DNA, 225 bp, Unknown; identical to SEQ ID NO: 4256
  bacterial strain Ascusb_20167A encodes 16S rRNA

SEQ ID NO: 4817 - DNA, 225 bp, Unknown
  bacterial strain Ascusb_20150A encodes 16S rRNA
agagtttgatcatggctcaggatgaacgctggcggcgtgcctaacacatgcaagtcgaacgaagcattgagatcggagattcgtcgaagattttaatgacttagtggcggacgggtgagtaatgtgtgagcaacctgcctttcagagggggacaacagttggaaacgactgctaataccgcataatgttttttaccggcatcggtaaaaaaccaaaggagcaatc

SEQ ID NO: 4818 - DNA, 225 bp, Unknown; identical to SEQ ID NO: 4256
  bacterial strain Ascusb_1125A encodes 16S rRNA

SEQ ID NO: 4819 - DNA, 225 bp, Unknown; identical to SEQ ID NO: 4256
  bacterial strain Ascusb_14943A encodes 16S rRNA

SEQ ID NO: 4820 - DNA, 225 bp, Unknown; identical to SEQ ID NO: 4256
  bacterial strain Ascusb_19296A encodes 16S rRNA

SEQ ID NO: 4821 - DNA, 225 bp, Unknown; identical to SEQ ID NO: 4213
  bacterial strain Ascusb_310B encodes 16S rRNA

SEQ ID NO: 4822 - DNA, 225 bp, Unknown; identical to SEQ ID NO: 4284
  bacterial strain Ascusb_2633B encodes 16S rRNA

SEQ ID NO: 4823 - DNA, 225 bp, Unknown; identical to SEQ ID NO: 4284
  bacterial strain Ascusb_8244B encodes 16S rRNA

SEQ ID NO: 4824 - DNA, 225 bp, Unknown; identical to SEQ ID NO: 4284
  bacterial strain Ascusb_83B encodes 16S rRNA

SEQ ID NO: 4825 - DNA, 225 bp, Unknown
  bacterial strain Ascusb_2590C encodes 16S rRNA
agagtttgatcatggctcaggatgaacgctagcgacaggcttaacacatgcaagtcgaggggcagcgcgatggtagcaatactattggcggcgaccggcgcactggtgagtaacacgtatgcgacctgccccggacagggggataaacccgggaaactgggcctaataccccataagtatcgaggatgcatgtccttgatatgaaagatccgtcggtccgggatg

SEQ ID NO: 4826 - DNA, 225 bp, Unknown
  bacterial strain Ascusb_2670A encodes 16S rRNA
agagtttgatcctggctcaggatgaacgctggcggcgtgcttaacacatgcaagtcgaacgaagcatctttacacgatcccttcggggtgacgaattgatgactgagtggcggacgggtgagtaacgcgtgggaaacctgccctgtaccgggggatagcagttggaaacggctgataataccgcataagcgcacagtaagacatcttaccgtgtgaaaaactccg

SEQ ID NO: 4827 - DNA, 225 bp, Unknown; identical to SEQ ID NO: 4826
  bacterial strain Ascusb_4366A encodes 16S rRNA

SEQ ID NO: 4828 - DNA, 225 bp, Unknown; identical to SEQ ID NO: 4152
  bacterial strain Ascusb_126B encodes 16S rRNA

SEQ ID NO: 4829 - DNA, 225 bp, Unknown; identical to SEQ ID NO: 4569
  bacterial strain Ascusb_21056A encodes 16S rRNA

SEQ ID NO: 4830 - DNA, 225 bp, Unknown; identical to SEQ ID NO: 4569
  bacterial strain Ascusb_4947A encodes 16S rRNA

SEQ ID NO: 4831 - DNA, 225 bp, Unknown; identical to SEQ ID NO: 4569
  bacterial strain Ascusb_14287A encodes 16S rRNA

SEQ ID NO: 4832 - DNA, 225 bp, Unknown; identical to SEQ ID NO: 4569
  bacterial strain Ascusb_3313A encodes 16S rRNA

SEQ ID NO: 4833 - DNA, 225 bp, Unknown
  bacterial strain Ascusb_7687A encodes 16S rRNA
agagtttgatcatggctcaggatgaacgccggcggtgtgcctaatacatgcaagtcgaacgcgttggcccaattgattgatggtgcttgcacctgatagattttggtcgccaacgagtggcggacgggtgagtaacacgtaggtaacctgcccagaagcgggggacaacatttggaaacagatgctaataccgcataacaacgttgttcgcatgaacaacgctta

SEQ ID NO: 4834 - DNA, 225 bp, Unknown; identical to SEQ ID NO: 4833
  bacterial strain Ascusb_1068B encodes 16S rRNA

SEQ ID NO: 4835 - DNA, 225 bp, Unknown; identical to SEQ ID NO: 4833
  bacterial strain Ascusb_2103A encodes 16S rRNA

SEQ ID NO: 4836 - DNA, 225 bp, Unknown; identical to SEQ ID NO: 4152
  bacterial strain Ascusb_5315B encodes 16S rRNA

SEQ ID NO: 4837 - DNA, 225 bp, Unknown; identical to SEQ ID NO: 4149
  bacterial strain Ascusb_676A encodes 16S rRNA

SEQ ID NO: 4838 - DNA, 225 bp, Unknown
  bacterial strain Ascusb_9441A encodes 16S rRNA
agagtttgatcctggctcaggatgaacgctagctacaggcttaacacatgcaagtcgaggggcagcatgatcgaagcttgctttgattgatggcgaccggcgcacgggtgagtaacgcgtatccaaccttccctatagtagagaatagcccggtgaaaatcggattaatgctctatgttattcaatgcggacatctaagttgaatcaaaggtttaccgctatagg

SEQ ID NO: 4839 - DNA, 225 bp, Unknown
  bacterial strain Ascusb_2792B encodes 16S rRNA
agagtttgatcatggctcaggacgaacgctggcggcgtgcttaacacatgcaagtcgtacgaggcagattttcatcactgaactttaaagagcggactgataaaagtgcttaactttaaggctgagtgatgaaaagatgccgagtggcaaacgggtgagtaacgcgtagacaacctgccgtaaagatggggacaacagttcgaaaggactgctaataccgaatgt

SEQ ID NO: 4840 - DNA, 225 bp, Unknown
  bacterial strain Ascusb_251A encodes 16S rRNA
agagtttgatcctggctcaggacgaacgctggcggcgtgcctaatacatgcaagtcgagcggacttgatggagagcttgctctcctgatagttagcggcggacgggtgagtaacacgtgggcaacctgcctcaaagtgggggatagccctccgaaaggaggattaataccgcataacattagttttccgcatgaaaaactaatcaaaggagtaatccgctttgag

SEQ ID NO: 4841 - DNA, 225 bp, Unknown
  bacterial strain Ascusb_6655B encodes 16S rRNA
agagtttgatcatggctcaggatgaacgctggcggcgtgcctaacacatgcaagtcgagcgatgaataaaccgacaaggtttcggccaaggaagtttattcagagcggcggatgggtgaggaacgcgtggggaacctgcctttcaccgggggataccagctggaaacggctgttaataccgcatatgctcacggtgccgcatggcacagggaggaaaactccggt

SEQ ID NO: 4842 - DNA, 225 bp, Unknown
  bacterial strain Ascusb_20912A encodes 16S rRNA
agagtttgatcctggctcaggacgaacgctggcggcgtgcttaacacatgcaagtcgaacgagacgaattagaagcttgcttttaacgagtcgagtggcaaacgggtgagtaacgcgtagacaacctgccgcaaagatggggacaacagtccgaaaggactgctaataccgaatgttgtatctcctccgcatggaagagatattaaagatggcctctacttgtaa

SEQ ID NO: 4843 - DNA, 225 bp, Unknown
  bacterial strain Ascusb_1536A encodes 16S rRNA
agagtttgatcatggctcagattgaacgctggcggcaggcctaatacatgcaagtcgaacggtaacatagaaaaagcttgctttttctgatgacgagtggcggacgggtgagtaaagtttgggaagctacctgatagagggggacaacagttggaaacgactgctaataccgcatacagcctgagggtgaaagcagcgatgcgctatcagatgcgcccaaatggg

SEQ ID NO: 4844 - DNA, 225 bp, Unknown
  bacterial strain Ascusb_1244B encodes 16S rRNA
agagtttgatcatggctcaggacgaacgctggcggcgtgcttaacacatgcaagtcgaacgagacgattttaagcttgcttagatgagtcgagtggcaaacgggtgagtaacgcgtagacaacctgccgcaaagatggggacaacagtccgaaaggactgctaataccgaatgttgtcagtttctcgcatgggagactgattaaagatggcctctacttgtaagc

SEQ ID NO: 4845 - DNA, 225 bp, Unknown
  bacterial strain Ascusb_987A encodes 16S rRNA
agagtttgatcctggctcaggacgaacgctggcggcgtgcctaatacatgcaagtcgagcgaaccaataagaagcttgctttttgttggttagcggcggacgggtgagtaacacgtgggtaacctgcctgtaagaccgggataactccgggaaaccggtgctaataccggatagattatctttccacctggagagataaggaaagatggcttttgccatcactta

SEQ ID NO: 4846 - DNA, 225 bp, Unknown
  bacterial strain Ascusb_2845A encodes 16S rRNA
agagtttgatcctggctcaggatgaacgctggcggcgtgcctaatacatgcaagtcgaacgagttttggtcgatgaacggtgcttgcactgtgattcaacttaaaacgagtggcggacgggtgagtaacacgtgggtaacctgcccttaagtgggggataacatttggaaacagatgctaataccgcataaatccaagaaccgcatggttcttggctgaaagatg

SEQ ID NO: 4847 - DNA, 225 bp, Unknown; identical to SEQ ID NO: 4846
  bacterial strain Ascusb_7519A encodes 16S rRNA

SEQ ID NO: 4848 - DNA, 225 bp, Unknown
  bacterial strain Ascusb_2686A encodes 16S rRNA
agagtttgatcctggctcaggatgaacgctagctacaggcttaacacatgcaagtcgaggggcagcagatcgaaagcttgcttttgatgctggcgaccggcgcacgggtgagtaacgcgtatccaaccttccctatagtagagaatagcccggcgaaagtcggattaatgctctatgttgtatttagaggacatctgaagaataccaaaggtttaccgctatagg

SEQ ID NO: 4849 - DNA, 225 bp, Unknown
  bacterial strain Ascusb_2786A encodes 16S rRNA
agagtttgatcctggctcaggacgaacgctggcggcgtgcttaacacatgcaagtcgaacggggcgatttaaaagcttgcttttgatgagcctagtggcaaacgggtgagtaacgcgtaggcaacctgccctcaggatggggacaacggcccgaaaggaccgctaataccgaatgaagtgtcggaatcgcatgatactgataccaaaggcggagcaatccgtcac

SEQ ID NO: 4850 - DNA, 225 bp, Unknown; identical to SEQ ID NO: 4849
  bacterial strain Ascusb_2254A encodes 16S rRNA

SEQ ID NO: 4851 - DNA, 225 bp, Unknown
  bacterial strain Ascusb_688B encodes 16S rRNA
agagtttgatcatggctcagattgaacgctggcggcatgctttacacatgcaagtcgaacggcagcacagggagcttgctcctgggtggcgagtggcgcacgggtgagtaatacatcggaacgtgtcctattgtgggggataactgctcgaaagggtggctaataccgcataagacctgagggtgaaagcgggggatcgcaagacctcgcgcaattggagcggcc

SEQ ID NO: 4852 - DNA, 225 bp, Unknown
  bacterial strain Ascusb_3276A encodes 16S rRNA
agagtttgatcctggctcaggatgaacgctagctacaggcttaacacatgcaagtcgaggggaaacgacagagagtgcttgcactttttgggcgtcgaccggcgaatgggtgagtaacgcgtatccaacctgcccttgactgagggatagcccagtgaaaactgaattaatacctcatgtactcctcagacggcatcagacgaggagcaaagattaatcggtcaa

SEQ ID NO: 4853 - DNA, 225 bp, Unknown
  bacterial strain Ascusb_3689B encodes 16S rRNA
agagtttgatcctggctcaggatgaacgctggcggcgtgcctaacacatgcaagtcgaacggaacttacaagcggaagttttcggatggaagcttataagtttagtggcggacgggtgagtaacgcgtgagcaatctacctctcagtgggggataacacatcgaaaggtgtgctaataccgcataatataacgggatcgcatggttctgttatcaaagatttatt

SEQ ID NO: 4854 - DNA, 225 bp, Unknown; identical to SEQ ID NO: 4477
  bacterial strain Ascusb_321A encodes 16S rRNA

SEQ ID NO: 4855 - DNA, 225 bp, Unknown
  bacterial strain Ascusb_16972A encodes 16S rRNA
agagtttgatcctggctcaggatgaacgctagctacaggcttaacacatgcaagtcgaggggcatcattatcggagcttgctttgatagatggcgaccggcgcacgggtgagtaacgcgtatccaaccttccccttagtagggcacagcccggcgaaagtcggattaattccctatgttgtttgatgctgacatcaaaatcaaaccaaagattcatcgctaaggg

SEQ ID NO: 4856 - DNA, 225 bp, Unknown; identical to SEQ ID NO: 4855
  bacterial strain Ascusb_11080A encodes 16S rRNA

SEQ ID NO: 4857 - DNA, 225 bp, Unknown
  bacterial strain Ascusb_1794B encodes 16S rRNA
agagtttgatcctggctcaggacgaacgctggcggcgtgcttaacacatgcaagtcgagcgatgaagctccttcgggagtggaatagcggcggacgggtgagtaacacgtgggtaacctgcctcatagaggggaatagcctttcgaaaggaagattaataccgcataagattgtagtgccgcatggcatagcaattaaaggagtaatccgctatgagatggaccc

SEQ ID NO: 4858 - DNA, 225 bp, Unknown
  bacterial strain Ascusb_51B encodes 16S rRNA
agagtttgatcatggctcaggacgaacgctggcggcgtgcttaacacatgcaagtcgaacgagaggacatggaaagcttgctttttatggaatcgagtggcaaacgggtgagtaacgcgtaagcaacctgccctgcagatggggacaacagctggaaacggctgctaataccgaatacgaagcagctcccgcatgggggcagcttgaaaggatggcctctgaata

SEQ ID NO: 4859 - DNA, 225 bp, Unknown
  bacterial strain Ascusb_5859A encodes 16S rRNA
agagtttgatcatggctcaggacgaacgctggcggcgtgcttaacacatgcaagtcgaacgagaggaattggaaagcttgctttttaatgaatcgagtggcaaacgggtgagtaacacgtaaacaacctgccttcaggatggggacaacagacggaaacgactgctaataccgaataccttccaagagccgcatgacagttggaagaaagggtggcctctacctg

SEQ ID NO: 4860 - DNA, 225 bp, Unknown
  bacterial strain Ascusb_3978A encodes 16S rRNA
agagtttgatcctggctcaggatgaacgccggcggtgtgcctaatacatgcaagtcgaacgcgttggcccaattgattgatggtgcttgcacctgattgattttggtcgccaacgagtggcggacgggtgagtaacacgtaggtaacctgccccaaagcgggggataacatttggaaacagatgctaataccgcataacaatttgaatcgcatgattcaaattta

SEQ ID NO: 4861 - DNA, 225 bp, Unknown
  bacterial strain Ascusb_917A encodes 16S rRNA
agagtttgatcctggctcaggacgaacgctggcggcgtgcttaacacatgcaagtcgaacggagaatttgcttcggtgaattcttagtggcgaacgggtgagtaacgcgtaggcaacctgccctctggttggggacaacattccgaaagggatgctaataccgaatgtgctcacacctccgcatggaggtgtgaggaaagatggcctctacttgtaagctatcgc

SEQ ID NO: 4862 - DNA, 225 bp, Unknown
  bacterial strain Ascusb_4364A encodes 16S rRNA
agagtttgatcatggctcaggacgaacgctggcggcgtgcttaacacatgcaagtcgaacgagacgagttttcaacactgaatgcttaataaagcaacttgaagcgtcattgcgacgaagtcgcaatttcacttttataaagtgcttaactaagaattgagcattgagtgttgaaaatgagtcgagtggcaaacgggtgagtaacgcgtagacaacctgccgcaa

SEQ ID NO: 4863 - DNA, 225 bp, Unknown
  bacterial strain Ascusb_1906A encodes 16S rRNA
agagtttgatcatggctcaggacgaacgctggcggcgtgcctaacacatgcaagtcgagcggagttaattgaaagcttgcttttgattaacttagcggcggacgggtgagtaacgcgtgggcaacctgcctgttacagggggataacacagggaaacttgtgctaataccgcataacacaacgagaaagcattttcttgttgtcaaaggagcaatccggtaatag

SEQ ID NO: 4864 - DNA, 225 bp, Unknown
  bacterial strain Ascusb_4840A encodes 16S rRNA
agagtttgatcctggctcaggacgaacgctggcggcgtgcttaacacatgcaagtcgaacgaggtgattgaaagcttgcttttgagaaccgagtggcaaacgggtgagtaacgcgtagacaacctgccgcaaagatggggacaacagtccgaaaggactgctaataccgaatgttgtgcaacctccgcatgggggatgcattaaagatggcctctacttgtaagc

SEQ ID NO: 4865 - DNA, 225 bp, Unknown
  bacterial strain Ascusb_351A encodes 16S rRNA
agagtttgatcctggctcaggatgaacgctagcgataggcctaacacatgcaagtcgaggggcagcatagagtagcaatactttgatggcgaccggcgcacgggtgagtaacacgtatgcaacctacctacatcaggggaataacccggagaaattcggactaataccgcataatacagggatgccgcatggcaatatttgttaaagatttatcggatgtagatg

SEQ ID NO: 4866 - DNA, 225 bp, Unknown
  bacterial strain Ascusb_13271B encodes 16S rRNA
agagtttgatcatggctcaggatgaacgctggcggcgtgcctaacacatgcaagtcgagcgagggagtaccttcgggtacaaactagcggcggacgggtgagtaacacgtgggtaacctgcctcatagagggggatagccttccgaaagggagattaataccgcatattattatgaattcgcatgaatttataatgaaaggagcaatccgctatgagatggaccc

SEQ ID NO: 4867 - DNA, 225 bp, Unknown
  bacterial strain Ascusb_2612B encodes 16S rRNA
agagtttgatcctggctcaggacgaacgctggcggcgtgcctaatacatgcaagtcgtgcggaccttttaaaagcttgcttttaaaaggttagcggcggacgggtgagtaacacgtgggcaacctgcctgtaagatcgggataacgccgggaaaccggggctaataccggatagtttttttctccgcatggaggaaaaaggaaagacggcttttgctgtcactta

SEQ ID NO: 4868 - DNA, 225 bp, Unknown
  bacterial strain Ascusb_2541B encodes 16S rRNA
agagtttgatcatggctcaggatgaacgctggcggcgtgcctaatacatgcaagtcgagcgagaaattctttaatgaatcttcggaggatttagagaatggacagcggcggacgggtgagtaacgcgtaggcaacctgcctcacacagagggatagccattggaaacgatgaataatacctcatgaaaccggaacaacacatgttgatccggtcaaagatttatc

SEQ ID NO: 4869 - DNA, 225 bp, Unknown
  bacterial strain Ascusb_4150A encodes 16S rRNA
agagtttgatcctggctcaggacgaacgctggcggcgtgcttaacacatgcaagtcgaacgaggcgattgaaagcttgcttttgaaagccgagtggcaaacgggtgagtaacgcgtagacaacctgccgcaaagatggggacaacagtccgaaaggactgctaataccgaatgttgtgcaacttccgcatgggggatgcattaaagatggcctctacttgtaagc

SEQ ID NO: 4870 - DNA, 225 bp, Unknown
  bacterial strain Ascusb_5667A encodes 16S rRNA
agagtttgatcatggctcaggataaacgctggcggcgcacataagacatgcaagtcgaacggacttaattcgttagtttactaatggaagcggttagtggcggactggtgagtaacgcgtaagcaacctgcctattagtagggaataacagtgagaaatcattgctaataccgtataagctggaaacatcgcatgatgtagtcagaaaaggagcaattcgctaat

SEQ ID NO: 4871 - DNA, 225 bp, Unknown
  bacterial strain Ascusb_2173A encodes 16S rRNA
agagtttgatcctggctcagattgaacgctggcggcatgccttacacatgcaagtcgaacggcagcatgatctagcttgctagattgatggcgagtggcgaacgggtgagtaatacatcggaacgtgccctgtagtgggggataactagtcgaaagattagctaataccgcatacgacctgagggtgaaagtgggggaccgcaaggcctcatgctataggagcgg

SEQ ID NO: 4872 - DNA, 225 bp, Unknown
  bacterial strain Ascusb_108A encodes 16S rRNA
agagtttgatcctggctcaggatgaacgctggcggcgtgcttaacacatgcaagtcgaacgaagcaacttattacgatcccttcggggtgacgatttgttgactgagtggcggacgggtgagtaacgcgtgggtaacctaccttgtacagggggacaacagttggaaacgactgctaataccgcataagcgcacggtatcgcatgatacagtgtgaaaagttttt

SEQ ID NO: 4873 - DNA, 225 bp, Unknown
  bacterial strain Ascusb_1366A encodes 16S rRNA
agagtttgatcctggctcaggatgaacgctagctacaggcttaacacatgcaagtcgaggggcagcataatcgaagcttgctttgattgatggcgaccggcgcacgggtgagtaacgcgtatccaaccttccccttagtagagaatagcccggcgaaagtcgaattaatactctatgttgttcgttgcgagcattcaagatgaaccaaaggtttaccgctaaggg

SEQ ID NO: 4874 - DNA, 225 bp, Unknown; identical to SEQ ID NO: 4860
  bacterial strain Ascusb_7156A encodes 16S rRNA

SEQ ID NO: 4875 - DNA, 225 bp, Unknown; identical to SEQ ID NO: 4488
  bacterial strain Ascusb_453B encodes 16S rRNA

SEQ ID NO: 4876 - DNA, 225 bp, Unknown
  bacterial strain Ascusb_4270A encodes 16S rRNA
agagtttgatcctggctcaggatgaacgctggcggcgtgcctaacacatgcaagtcgagcgatgaacggatggacaaggcttcggccaaggaaatctgttcagagcggcggatgggtgaggaacgcgtggggaacctgcctttcaccgggggataccagctggaaacggctgttaataccgcatatgctcacagtgccgcatggcacagggaggaaaactccggt

SEQ ID NO: 4877 - DNA, 225 bp, Unknown
  bacterial strain Ascusb_2704A encodes 16S rRNA
agagtttgatcatggctcaggatgaacgctggcggcgtgcctaatacatgcaagtcgtacggaccgcttcggcggtcagtggcgaacgggtgaggacaacataggtaacctgcccctccgagggggacaacagctggaaacggctgctaagaccgcatagacgtgcaggaggcatctcctgcacgctaaatggcccttcaaggccagcggagggatggacctatg

SEQ ID NO: 4878 - DNA, 225 bp, Unknown
  bacterial strain Ascusb_4177A encodes 16S rRNA
agagtttgatcatggctcaggacgaacgctggcggcgtgcctaatacatgcaagtagaacgctgaagactttagcttgctagagttggaagagttgcgaacgggtgagtaacgcgtaggtaacctgcctattagcgggggataactattggaaacgatagctaataccgcataatagtgtttaacacatgttagagacttgaaagatgcaattgcatcactagta

SEQ ID NO: 4879 - DNA, 225 bp, Unknown; identical to SEQ ID NO: 4609
  bacterial strain Ascusb_2710A encodes 16S rRNA

SEQ ID NO: 4880 - DNA, 225 bp, Unknown; identical to SEQ ID NO: 4609
  bacterial strain Ascusb_5711A encodes 16S rRNA

SEQ ID NO: 4881 - DNA, 225 bp, Unknown
  bacterial strain Ascusb_3606B encodes 16S rRNA
agagtttgatcatggctcaggacgaacgctggcggcgtgcttaacacatgcaagtcgagcgaggaaattccttcgggagtttcctagcggcggacgggtgagtaacacgtgggcaacctgcctgatagagggggatagcctcccgaaagggagattaataccgcataaagtcaaatgaaggcatcttcaaatgaccaaaggagtaatccgctatcagatgggccc

SEQ ID NO: 4882 - DNA, 225 bp, Unknown
  bacterial strain Ascusb_20052B encodes 16S rRNA
agagtttgatcctggctcaggatgaacgctagctacaggcttaacacatgcaagtcgaggggaaacgacaaagagtgcttgcacactttgggcgtcgaccggcgaatgggtgagtaacgcgtatccaacctgcccttgactgagggatagcccagtgaaaactgaattaatacctcatgttctcctccgacggcatcagacgaggagtaaagatttatcggtcaa

SEQ ID NO: 4883 - DNA, 225 bp, Unknown; identical to SEQ ID NO: 2099
  bacterial strain Ascusb_17652A encodes 16S rRNA

SEQ ID NO: 4884 - DNA, 225 bp, Unknown; identical to SEQ ID NO: 2266
  bacterial strain Ascusb_318A encodes 16S rRNA

SEQ ID NO: 4885 - DNA, 225 bp, Unknown
  bacterial strain Ascusb_2516A encodes 16S rRNA
agagtttgatcatggctcaggatgaacgctagctacaggcttaacacatgcaagtcgaggggcagcatttttctagcaatagaagagatggcgaccggcgcacgggtgagtaacacgtatccaacctgccgataactctggaatagcctttcgaaagaaagattaataccggatagtatacgaatatcgcatgatatttttattaaagaatttcggttatcgatg

SEQ ID NO: 4886 - DNA, 225 bp, Unknown
  bacterial strain Ascusb_7077A encodes 16S rRNA
agagtttgatcatggctcaggatgaacgctggcggcgtgcctaatacatgcaagtcgaacgagttttggtcgatgaacggtgcttgcactgtgattcaacttaaaacgagtggcggacgggtgagtaacacgtgggtaacctgcccttaagtgggggataacatttggaaacagatgctaataccgcataaatccaagaaccgcatggttcttggctgaaagatg

SEQ ID NO: 4887 - DNA, 225 bp, Unknown
  bacterial strain Ascusb_5136B encodes 16S rRNA
agagtttgatcctggctcaggatgaacgctagctacaggcttaacacatgcaagtcgaggggcagcattatcgaagcttgctttgatagatggcgaccggcgcacgggtgagtaacgcgtatccaaccttccccatagtagggcatagcccgtagaaatgcggattaataccctatgtattccgaggatgacatctgattcggaacaaaggttcaccgctatggg

SEQ ID NO: 4888 - DNA, 225 bp, Unknown
  bacterial strain Ascusb_156A encodes 16S rRNA
agagtttgatcatggctcaggacgaacgctggcggcgtgcttaacacatgcaagtcgagcgagggagtaccttcgggtacaacctagcggcggacgggtgagtaacacgtgggcaacctgccttgtagtgggggatagccctccgaaaggaggattaataccgcataacatcattttatcgcatggtagaatgatcaaaggagtaatccgctacaagatgggccc

SEQ ID NO: 4889 - DNA, 225 bp, Unknown
  bacterial strain Ascusb_1101A encodes 16S rRNA
agagtttgatcatggctcaggacgaacgctggcggcgtgcttaacacatgcaagtcgaacggggcgatttaaaagcttgcttttgatgagcctagtggcaaacgggtgagtaacgcgtaggcaacctgccctcaggatggggacaacggcccgaaaggaccgctaataccgaatgacgtatcgggatcgcatgatactgataccaaaggcggagcaatccgtcac

SEQ ID NO: 4890 - DNA, 225 bp, Unknown; identical to SEQ ID NO: 4591
  bacterial strain Ascusb_141A encodes 16S rRNA

SEQ ID NO: 4891 - DNA, 225 bp, Unknown
  bacterial strain Ascusb_12866A encodes 16S rRNA
agagtttgatcctggctcaggatgaacgctggcggcgtgcttaacacatgcaagtcgagcgagaaatcgcggaaggaagcttcggtagaattctgtgatggaaagcggcggacgggtgagtaacgcgtgggaaacctgcccttgacagggggacagccgagggaaacttcgattaataccccataacgcagagagaccgcatggtcattctgccaaagaattatc

SEQ ID NO: 4892 - DNA, 225 bp, Unknown
  bacterial strain Ascusb_1702A encodes 16S rRNA
agagtttgatcatggctcagattgaacgctggcggcaggcctaacacatgcaagtcgaacggtaacagaaagcagcttgctgctttgctgacgagtggcggacgggtgagtaatgtctgggaaactgcctgatggagggggataactactggaaacggtagctaataccgcataacgtcgcaagaccaaagagggggaccttcgggcctcttgccatcggatgtg

SEQ ID NO: 4893 - DNA, 225 bp, Unknown
  bacterial strain Ascusb_1890A encodes 16S rRNA
agagtttgatcctggctcaggatgaacgctggcggcgtgcctaatacatgcaagtcgaacgctttgtggttcaactgatttgaagagcttgctcagatatgacgatggacattgcaaagagtggcgaacgggtgagtaacacgtgggaaacctacctcttagcaggggataacatttggaaacagatgctaataccgtataacaatgacaaccgcatggttgtta

SEQ ID NO: 4894 - DNA, 225 bp, Unknown; identical to SEQ ID NO: 2092
  bacterial strain Ascusb_13587A encodes 16S rRNA

SEQ ID NO: 4895 - DNA, 225 bp, Unknown; identical to SEQ ID NO: 2092
  bacterial strain Ascusb_20566A encodes 16S rRNA

SEQ ID NO: 4896 - DNA, 225 bp, Unknown
  bacterial strain Ascusb_223A encodes 16S rRNA
agagtttgatcatggctcaggatgaacgccggcggtgtgcctaatacatgcaagtcgaacgcgttggcccgattgattgatggtgcttgcacctgattgattttggtcgccaacgagtggcggacgggtgagtaacacgtaggtaacctgcccagaagcgggggacaacatttggaaacagatgctaataccgcataacaacgttgttcgcatgaacaacgctta

SEQ ID NO: 4897 - DNA, 225 bp, Unknown; identical to SEQ ID NO: 4896
  bacterial strain Ascusb_198B encodes 16S rRNA

SEQ ID NO: 4898 - DNA, 225 bp, Unknown; identical to SEQ ID NO: 4896
  bacterial strain Ascusb_1661B encodes 16S rRNA

SEQ ID NO: 4899 - DNA, 225 bp, Unknown; identical to SEQ ID NO: 4889
  bacterial strain Ascusb_300A encodes 16S rRNA

SEQ ID NO: 4900 - DNA, 225 bp, Unknown; identical to SEQ ID NO: 4889
  bacterial strain Ascusb_813B encodes 16S rRNA

SEQ ID NO: 4901 - DNA, 225 bp, Unknown; identical to SEQ ID NO: 4889
  bacterial strain Ascusb_3757A encodes 16S rRNA

SEQ ID NO: 4902 - DNA, 225 bp, Unknown
  bacterial strain Ascusb_4971B encodes 16S rRNA
agagtttgatcatggctcaggatgaacgctggcggcgtgcttaacacatgcaagtcgagcgagaaatcgcggaaggaagcttcggtagaattctgtgatggaaagcggcggacgggtgagtaacgcgtgggaaacctgcccttgacagggggacagccgagggaaacttcgattaataccccataacgcagagagaccgcatggtcattctgccaaagaattatc

SEQ ID NO: 4903 - DNA, 225 bp, Unknown; identical to SEQ ID NO: 4889
  bacterial strain Ascusb_1179B encodes 16S rRNA

SEQ ID NO: 4904 - DNA, 225 bp, Unknown
  bacterial strain Ascusb_7150A encodes 16S rRNA
agagtttgatcatggctcaggatgaacgctagctacaggcttaacacatgcaagtcgaggggcagcatggtcttagcttgctaagattgatggcgaccggcgcacgggtgagtaacgcgtatccaaccttccctatagtaggggatagcccgtagaaatgcggattaataccctatgttgtatttcgatgacatctgacgaataccaaaggttcaccgctatagg

SEQ ID NO: 4905 - DNA, 225 bp, Unknown
  bacterial strain Ascusb_3125A encodes 16S rRNA
agagtttgatcctggctcaggatgaacgctagcgacaggcttaacacatgcaagtcgaggggcagcgcggaggtagcaatacttctggcggcgaccggcgcactggtgagtaacacgtatgcgacctgccccggacagggggataaacccgggaaactgggcctaataccccataagtatcgaggatgcatgtccttgatatgaaagatccgtcggtccgggatg

SEQ ID NO: 4906 - DNA, 225 bp, Unknown; identical to SEQ ID NO: 4033
  bacterial strain Ascusb_894A encodes 16S rRNA

SEQ ID NO: 4907 - DNA, 225 bp, Unknown; identical to SEQ ID NO: 4694
  bacterial strain Ascusb_804B encodes 16S rRNA

SEQ ID NO: 4908 - DNA, 225 bp, Unknown; identical to SEQ ID NO: 4694
  bacterial strain Ascusb_668A encodes 16S rRNA

SEQ ID NO: 4909 - DNA, 225 bp, Unknown; identical to SEQ ID NO: 4694
  bacterial strain Ascusb_10267A encodes 16S rRNA

SEQ ID NO: 4910 - DNA, 225 bp, Unknown; identical to SEQ ID NO: 4694
  bacterial strain Ascusb_2188B encodes 16S rRNA

SEQ ID NO: 4911 - DNA, 225 bp, Unknown
  bacterial strain Ascusb_1785A encodes 16S rRNA
agagtttgatcatggctcaggacgaacgctggcggcgtgcctaacacatgcaagtcgagcgggagacttcggtctctagcggcggacgggtgagtaacacgtgggtaacctgccttagtgagggggatagcctcccgaaagggagattaataccgcataacattgcgatatcgcatgatattgtaattaaaggagtaatccgcactaagatggacccgcggcgca

SEQ ID NO: 4912 - DNA, 225 bp, Unknown
  bacterial strain Ascusb_372A encodes 16S rRNA
agagtttgatcctggctcaggacgaacgctggcggcgtgcttaacacatgcaagtcgagcgatgaagctccttcgggagtggattagcggcggacgggtgagtaacacgtgggtaacctgcctcatagaggggaatagcctttcgaaaggaagattaataccgcatatggtagctttatcgcatggtagtgctattaaaggagtaatccgctatgagatggaccc

SEQ ID NO: 4913 - DNA, 225 bp, Unknown
  bacterial strain Ascusb_1007A encodes 16S rRNA
agagtttgatcatggctcaggacgaacgctggcggcgtgcttaacacatgcaagtcgaacgaggtgattgaaagcttgcttttgagaaccgagtggcaaacgggtgagtaacgcgtagacaacctgccgcaaagatggggacaacagtccgaaaggactgctaataccgaatgttgtcagtttctcgcatgggagactgattaaagatggcctctacttgtaagc

SEQ ID NO: 4914 - DNA, 225 bp, Unknown
  bacterial strain Ascusb_1212A encodes 16S rRNA
agagtttgatcctggctcagattgaacgctggcggcaggcctaacacatgcaagtcgagcggcagcggaaagtagcttgctactttgccggcgagcggcggacgggtgagtaatgtctgggaaactgcctgatggagggggataactactggaaacggtagctaataccgcataacgtcgcaagaccaaagagggggaccttcgggcctcttgccatcagatgtg

SEQ ID NO: 4915 - DNA, 225 bp, Unknown; identical to SEQ ID NO: 4671
  bacterial strain Ascusb_1476A encodes 16S rRNA

SEQ ID NO: 4916 - DNA, 225 bp, Unknown
  bacterial strain Ascusb_5237A encodes 16S rRNA
agagtttgatcctggctcaggatgaacgctagctacaggcttaacacatgcaagtcgtggggcagcatgggggttgcttgcaatccctgatggcgaccggcgcacgggtgagtaacgcgtatccaacctggcccatagtagggaatagcccggcgaaagtcggattaatgccctatgttctcctttgatggcatctgacgaggagcaaagattcatcgctatggg

SEQ ID NO: 4917 - DNA, 225 bp, Unknown
  bacterial strain Ascusb_3521A encodes 16S rRNA
agagtttgatcctggctcaggatgaacgctagctacaggcttaacacatgcaagtcgaggggcagcatatcgaaagcttgcttttgatgatggcgaccggcgcacgggtgagtaacgcgtatccaaccttccctatactagaggatagcccggcgaaagtcggattaatactctatgttcttcgtagaagacatctgaaatgaagcaaaggtttaccggtatagg

SEQ ID NO: 4918 - DNA, 225 bp, Unknown; identical to SEQ ID NO: 4916
  bacterial strain Ascusb_3379A encodes 16S rRNA

SEQ ID NO: 4919 - DNA, 225 bp, Unknown; identical to SEQ ID NO: 2055
  bacterial strain Ascusb_466A encodes 16S rRNA

SEQ ID NO: 4920 - DNA, 225 bp, Unknown; identical to SEQ ID NO: 4502
  bacterial strain Ascusb_6159A encodes 16S rRNA

SEQ ID NO: 4921 - DNA, 225 bp, Unknown
  bacterial strain Ascusb_299A encodes 16S rRNA
agagtttgatcatggctcaggacgaacgctggcggcgtgcttaacacatgcaagtcgaacgaggtgattgaaagcttgcttttgagaaccgagtggcaaacgggtgagtaacgcgtagacaacctgccgcaaagatggggacaacagtccgaaaggactgctaataccgaatgttgtcagtttctcgcatgagagactgattaaagatggcctctacttgtaagc

SEQ ID NO: 4922 - DNA, 225 bp, Unknown; identical to SEQ ID NO: 4921
  bacterial strain Ascusb_346A encodes 16S rRNA

SEQ ID NO: 4923 - DNA, 225 bp, Unknown
  bacterial strain Ascusb_2179B encodes 16S rRNA
agagtttgatcctggctcaggacgaacgctggcggcgtgcctaatacatgcaagtggaacgcatgattgataccgtagcttgctacaccattaatcatgagtcgcgaacgggtgagtaacgcgtaggtaacctgcctactagcgggggataactattggaaacgatagctaataccgcataaaaggatttaacccatgttaaaactttgaaagaagcaagagctt

SEQ ID NO: 4924 - DNA, 225 bp, Unknown
  bacterial strain Ascusb_4208A encodes 16S rRNA
agagtttgatcctggctcaggatgaacgctggcggcgtgcctaacacatgcaagtcgagcgagggagcaccttcgggtacaaactagcggcggacgggtgagtaacacgtgggtaacctgcctcatagagggggatagccttccgaaagggagattaataccgcatattattatgaattcgcatgaatttataatgaaaggagtaatccgctatgagatggaccc

SEQ ID NO: 4925 - DNA, 225 bp, Unknown; identical to SEQ ID NO: 4148
  bacterial strain Ascusb_9477A encodes 16S rRNA

SEQ ID NO: 4926 - DNA, 225 bp, Unknown; identical to SEQ ID NO: 4148
  bacterial strain Ascusb_4760A encodes 16S rRNA

SEQ ID NO: 4927 - DNA, 225 bp, Unknown
  bacterial strain Ascusb_1532A encodes 16S rRNA
agagtttgatcctggctcaggacgaacgctggcggcgtgcttaacacatgcaagtcgagcgatgaaattccttcgggaatagattagcggcggacgggtgagtaacacgtgggtaacctgcctcatagaggggaatagcctttcgaaaggaagattaataccgcataagattgtagtgtcgcatggcatagcaattaaaggagtaatccgctatgagatggaccc

SEQ ID NO: 4928 - DNA, 225 bp, Unknown; identical to SEQ ID NO: 4917
  bacterial strain Ascusb_7836A encodes 16S rRNA

SEQ ID NO: 4929 - DNA, 225 bp, Unknown
  bacterial strain Ascusb_5587A encodes 16S rRNA
agagtttgatcatggctcaggacgaacgctggcggcgtgcttaacacatgcaagtcgagcgatgaaatcccttcggggatggattagcggcggacgggtgagtaacacgtgggcaacctgcctcaaagtgggggatagccttccgaaaggaagattaataccgcataacattagtatttcacatgaagtactaattaaaggagtaatccgctttgagatgggccc

SEQ ID NO: 4930 - DNA, 225 bp, Unknown; identical to SEQ ID NO: 3106
  bacterial strain Ascusb_2341A encodes 16S rRNA

SEQ ID NO: 4931 - DNA, 225 bp, Unknown; identical to SEQ ID NO: 4929
  bacterial strain Ascusb_6424A encodes 16S rRNA

SEQ ID NO: 4932 - DNA, 225 bp, Unknown; identical to SEQ ID NO: 2052
  bacterial strain Ascusb_1079B encodes 16S rRNA

SEQ ID NO: 4933 - DNA, 225 bp, Unknown; identical to SEQ ID NO: 4790
  bacterial strain Ascusb_9544A encodes 16S rRNA

SEQ ID NO: 4934 - DNA, 225 bp, Unknown; identical to SEQ ID NO: 4649
  bacterial strain Ascusb_5179A encodes 16S rRNA

SEQ ID NO: 4935 - DNA, 225 bp, Unknown
  bacterial strain Ascusb_295B encodes 16S rRNA
agagtttgatcctggctcaggatgaacgctggcggcgtgcctaatacatgcaagtcgagcgagaaattctttaatgaatcttcggaggatttaaagaatggacagcggcggacgggtgagtaacgcgtaggcaacctgcctcacacagagggatagccattggaaacgatgaataatacctcatgaaaccggaacaacacatgttgatccggtcaaagatttatc

SEQ ID NO: 4936 - DNA, 225 bp, Unknown; identical to SEQ ID NO: 4233
  bacterial strain Ascusb_4081A encodes 16S rRNA

SEQ ID NO: 4937 - DNA, 225 bp, Unknown
  bacterial strain Ascusb_820A encodes 16S rRNA
agagtttgatcctggctcaggatgaacgccggcggtgtgcctaatacatgcaagtcgaacgcgttggcccaattgattgatggtgcttgcacctgattgattttggccgccaacgagtggcggacgggtgagtaacacgtaggtaacctgcccagaagcgggggacaacatttggaaacagatgctaataccgcataacaacgttgttcgcatgaacaacgctta

SEQ ID NO: 4938 - DNA, 225 bp, Unknown
  bacterial strain Ascusb_57A encodes 16S rRNA
agagtttgatcctggctcaggatgaacgctagctacaggcttaacacatgcaagtcgaggggaaacgagagagaagcttgcttttcttgtcgtcgaccggcgcacgggtgagtaacgcgtatccaacctgcccctggctaagggataacccgtagaaatgcggcctaataccttatgatctccgaagaagacatctgacttggagtaaagatttatcggcgaggg

SEQ ID NO: 4939 - DNA, 225 bp, Unknown; identical to SEQ ID NO: 4938
  bacterial strain Ascusb_17128A encodes 16S rRNA

SEQ ID NO: 4940 - DNA, 225 bp, Unknown
  bacterial strain Ascusb_1312A encodes 16S rRNA
agagtttgatcatggctcaggatgaacgctggcggcgtgcctaacacatgcaagtcgagcgatgaacggatggacaaggcttcggccaaggaaatctgttcagagcggcggatgggtgaggaacgcgtggggaacctgcctttcaccgggggataccagctggaaacggctgttaataccgcatatgctcacagtgccgcatggcacagggaggaaaactccggt

SEQ ID NO: 4941 - DNA, 225 bp, Unknown
  bacterial strain Ascusb_4803A encodes 16S rRNA
agagtttgatcctggctcaggacgaacgctggcggcgtgcttaacacatgcaagtcgaacgagacgattgaaagcttgcttttgagagtcgagtggcaaacgggtgagtaacgcgtagacaacctgccgcaaagatggggacaacagtccgaaaggactgctaataccgaatgttgtatcgtttccacatggagatgatattaaagatggcctctacttgtaagc

SEQ ID NO: 4942 - DNA, 225 bp, Unknown; identical to SEQ ID NO: 4343
  bacterial strain Ascusb_16442C encodes 16S rRNA

SEQ ID NO: 4943 - DNA, 225 bp, Unknown
  bacterial strain Ascusb_17A encodes 16S rRNA
agagtttgatcctggctcaggacgaacgctggcggcgtgcctaacacatgcaagtcgaacgaagcactggaaatgattccttcgggttgattttcctttgactgagtggcggacgggtgagtaacacgtgagcaacctgcctttcagagcgggatagcagttggaaacgactgataataccgcatgacatgtctcttccgcatgagagagacatcaaatgatttt

SEQ ID NO: 4944 - DNA, 225 bp, Unknown; identical to SEQ ID NO: 4715
  bacterial strain Ascusb_409A encodes 16S rRNA

SEQ ID NO: 4945 - DNA, 225 bp, Unknown
  bacterial strain Ascusb_17848A encodes 16S rRNA
agagtttgatcatggctcaggatgaacgctagctacaggcttaacacatgcaagtcgaggggaaacggcagtctagcttgctagagtggacgtcgaccggcgaatgggtgagtaacgcgtatccaaccttccgcgaagtacggaatagccttgcgaaagtaagattaatgccgtatgtggtgtttggaagacatctgaagaacactaaagattcatcgcttcgcg
